United States Patent Application Publication US 2022/0290142 A1 - sequence listing, part 19

SEQ ID NO: 15538 - DNA, 193227 bp, Homo sapiens
ggaatacaaaaggaggaacccagacgctcatggagacagcctcggttcataaatcaggtggggccaggggctgggggcccacacgccatggagcccgactcccttctggaccaagacgactcctacggtaagacggtgccagcaaagtgcagagttgggggtttcagcctctctgctcaacagacttttctctgctataggaatctgagttgaagcagggaggcagtcaggcatctgggcactgtctggtcttgggacccatgggtgggcatgggtgcgttgggctatgagactcagggctggagggtccctggagcgggcagcccctcagactccaggcattgacaaggtccaggggagggagagagagtttctcagctgcttctgttttgctcctggccaagaaggaaaggaaggaagttttgcagcccccctgcctgtctgcctacctcgctgttcgccaggcctgccctgtgctgtggggaattcaattagtgcgatcctgcggataaatatagatggaagaggcaacaggaacataccttgtaattaaaggccagggctcatgctgaaagcactccccgtgtgacagggccccagtggctgccaccggagagctgcccaggccactggaagctctgcatgcattattgggggaaaagttgctcgggacagagcccatgcagagtctggaagagggatttataagactcggaagggttccttcgtggtggtttctgcaggcctggggctccagcgacgcagtaactcagctcctgcactactcagcctggccagagagctcacatttggctgggatgcccggcacagcctggctgtctctggacaaccaaggagggacgcaagagtgcaagagtgtggccgaggcaccgaggctgggcatgggggggtggggcagcaggttttgggactcagcagggagaagtcctgttggcctcggaagaggtggtaattgcagggcgacctcatcccagcttgggtcaggtcagccttccaggggttcaggtcctcctgagaccacagttctactaagaaaaccaagtgcttgtttctccggactttcccccaccccatccaggcctggctgcctggcacagattcaaggccaaatttccttcctcctgcaggagctcagccctttccaaggagaggggccctttgccacgtttggagctgcagccctcagggaagcttggcaaggcccagcccacagacctggcatctttgggcccaggggacggggggtcagttgatgcatgcagagtgacctccatgtgccaagccctgtgtcagggtcagggatgtgtaggaatgaggaactcagtcctaacaaatagttggtgcttagtgaatggaaggaggaggagaatacaaagggaggagagagggaaaaaaatagggagagcagcccttggcctggaagagctcccagtctggaatgggagacagacaaacgatcccagactaaattcagagtgatgcggtccttggggaggccaggggcagacagcctgagggtgtgggacaggcctgcctgcctccagagctgttcactggaagcttggcattgggatgcgtatggactcattggatgtctggatgctcccctagggagggcactgacctttgaagaggcaggcgagggggtgggaaggaccagccccagccagggatatctcaggaacccacagtccccacttgctgtcctccagatttgctagtagcagcctctgggctgggcaaggctggaaactgaggctgcctccaccctcatggaaaggccccatgcacaatcagctccttgtcctggcctgtcacgaggccggttgctgatctcctggaagctggccaggcagggaggtaagggattcaagaggaagaggaaagggacagagggggccttaggaaagggacaggcaggcatggagtggagcccaggctctctctgggagcaatcccaggcccagctggagaggggtctggcttttccagccaaggtctcccacccagccagcctcaggggtccagggctgaaggaggccatcctgggtcagggcagcacaggaaaactgcggtctcagtgagtcacttccccagtctgagccccggttctacattcatcaatttaacaattactttcaggttctggactgggctttggtgttcaagaacaaatcaaactttgtgactttcctaggctaatctgagagagatgcaggtgcactgatgggggaagtcaaggcgtgtggaagccctaaccctatacttggaatccagaaaggcttcctggcagaggtgactcctccactgaagaagtcaatgattccctctatattgatcagctcaggctgctgtaacgaaatagacaaggtgactcacacaacaaagatttcagaaacagaaattaaaacagaaggctgggcgcagtggctcatgcctgaaatcccagcactttgggaggctgaggcaggtggatcacttgaagtcaggagtttgaggccagcctggccaacatggtgaaaccccatctctactaaaaacacaaaaaattagccaggcatggtggtgcatgcctttaatcccagctacttgggaggctgaggcataagaaccacttgaactcgggaggcaaaagctacagtgagccaagatcacgctgctgcactccagcctgggcgacagagagcgagatgccatctcagaagtaataataacattttgcagtgatgtgatcaaaggtcactgcagccttgaactcctaggctcaagggatccttctgtcttagcctcctgaatagctgtgactacaaacatacaccaccacacctcactaattaaaatttttgtgtgtgtgtggagatggggtcttgctgtgttgcccaggctggtctagaactctcgggctcaagcaattccaatgcctcagggtcccaagtgttgggattctaggcgtgagccacagcagtcagcccttttctctttctcttttttttttttttttttttttgagatggggtcttactctgtcatccaggctggagtgcagtggtgcgatctcagctcaattgcaacctccacttcccaggctcaatccatcctcccacctcagcctcccgagtagctgggaccacaggtgcacaacaccatgcccagctaattttttgtatttttggtagagacaggttttcgccatgttgcccaggctggtctcgaactcctgagctcaagtgatccacctgcctcagcctcccaaagtgctgtgatccttttgtctcttcttataaggacactaatcctactagggccccatccttatgacctcatttaaccttaattactccttagaggccccatttccagacagagccacgctgggagttcaacatatgacttgaggatgggagggatacacatgttcagtccacaacaccctccttttttattgagacagggtctcactctgtcacccaggctagagtgcaatggcatgatcacagcttactgcagcttcgaactcctgggtgtaagcaatcctcctgcttcagccttcagaatagctggactacaggcatgcaccaccatgcctggctaatttttgtattttttgtagagacagggtttgcccacgttgcccaggctggtctcaaactcctgggctctctcaatctgcccgcctcggcttcccaaagtgctgggattacaggcatgagccacagtgccggcctggcttctgggacaggctgctctcggggtttcctcccattatctctggctggccccttctcctggggctctctctcctgctgctgcccacagggtcccttcgccagtgcctgcctcctctgctccttcatgattgaactcttcctccttcacccctcactccctcgcttcccgccatcagatctgaccttcctcacgcccccaagctgtctccccccagggcctttgagcatccttcctctttctcttccctgagctaattcctcctcctcttcccagtatcaactgaaaagtcacctcctcagagaagccctccttaaaccatgttcccccaatgcatcactctcataggccctcttttcctttatggacgtgttcatatgtgcactacacattattgcatgctgatgtgtttcacctgcatctcccgtgagtctctaagcaatctggatccccagagcatagttctccacctggcaggagtaagcatccaacaaatgcttgttgaatgagtgagtgaacaaatgcagttggtgcaggcaaaaaggcaaggaaaggcattccagggcagaagaaacagcaggtgcaaaggcatggagactggtgatgctttggagcattctctgatacttacaatcttggtcaggggttggcaagctgagctcctttagggggctcaggaacattgatggggatggggaagggttgggagctgcaaagctgggggtgaggctctggacatctctccctgcttcaagctgagcaaagcgcctttcgtctagtgaagaccccagttctgattgcatccatcaggtgttcagaggctgaaagggttcagccatggcatggtgggggatccgcagccactggcactgaagttctggaggcctaagcctcttagcaggcaggactgagcagagccctattgggtggtctggcggtgggagccccttagagcatggccaagaagggctcagacacagctgcagcgaggagcagacataggtgcagaggtttcttttacaggacagtcagaggcaggaaggtgaggagaaggggagagctcggaaactcggcactaacccctgcagagcccttgtgattggccttagtttccctaggtgtaaattggggtgacggccagacaagatgtgactgtcccctctggtgccagccccttggagctgtgtgaaaagtccagctcagagaagcatgtcctttccgtctgccttgtgatttccaaagaagggggcaagacagaggcctggcagcggccagcataagagaaaaagtcctgccctgcaaaatatgctttctccgggttcttttggagtcctgctatttctccacttcgtgggtaccgtcctcctaccaggacagctcctggtgcttcctccgcctgggtgtgttttcattgtctgctcaccagcctgactcccacatgagactataaggcccttgagggcaggggctgtatcttgtctgccactgggttcccagggtgctgcacagcactggtcctgagaaggcactcaatacatactcagtggatgaatgaatgaatgaatgaatgaatgaataagtgagcgagagtgagtgaattaatgagtggcatgagctggatcctgcccttaacttgctccgcatccttaggcatcctccccgactctggacttctggttccttagctgtcagctgagggtgctgggccccatgccccaagagagcaggcctgcatctcatcccagctctctcggttattgggtggcctggaccaagtccctgccctgacttagcctcagcttcctcatctgacaaatgggcagactcagccctgccctgcctgtttttcaggcggtcttggagctctggaggagtaaggaggcaaaacagtgtgaggctggacacctgtcaggggagtctgtgactcgtacaggagcgggggttgggctcagacagcccgctgggataaaccctccagaagcgggtggttgctttcgatatcatggaggtggagcaggcagctcaaaagctcagaactttccatttcttcctgatgacaaccagcatgggcatctacctcagggttgttggcagatcccagcagagaagcaggtggatgtgagtttgtaaacttcccaatgctactgctgtaataactgtttggtaagcacctactccatgccaggatccaaagacactttatctacactgtcttctgttttggtttgtttgtttgtttgtttttgagatggagtttcgctcttgttgcccaggctggagtgcaatggcgcaatctcggctcactccaacctctgcctcctgggtttaagcgattctcctgcctcaacctcccaagtagctgggattacaggcatgcgtcaccaagcctggctaattttgaattttttggtagaggcggggtttcgccatgttggtcaagctggtctcgaacttctgacctcaggtgatccacccgccttggcctcccaaactgctaggattacaggcgtgagccaccgtgcccagcatttttttgttttgttttttgttttttgagatagagtctcactctgtcgcccagtttagagtgcagtagcatgatcttggctcactgcaacctccacctcctgggttcaagcaattctcctgcctcagcctcctgagtagctgggactacaggcgcgcaacaccaggcccggctaatttttctgtttttgtagagatggggttttgccatgtgagcaggctggtcttgaactcctgacctcaggtaatctgcccaccttggcctcccaaaatgctgggattagaggtgtgagccactgcatctggcctacattgtcttctgaatccttgcaatacacctggtgggttgcagttagccttattttccagatgagaaaattgaggcccaaggaggttacgtgactggccctgatcacgcagtgagtgcactgatttgaacccagctttctccagctacaaagcctgatatctttattttgctgcagtcctgaaagccattgtgtgccaaagctgccacctggaggcccctccctgtgcctgtggaaaatcctctctcccggggagcgttcactgaagcagctcagagatgtggcaggagccatgtcagctcagctggccaaggcgagaggcagactcagctgtgggacagggatggtctaaagagaagacaatttgaggccaaaatagcctaatgtcatcagggggcctgatatcatgactccctgggccttcctttgagaggcagagggattagcttcaactggtgacagatagataataattgtaaaaaataacagctatgtgtccagccactggcctcccatccatcgtctcgcttcccctgcttaggcctgccctccctctgaggcctcctcctggctctgccactcagctcactcagcaggtgccagccaaagacctgggctctcatcgagcctccatttccccatctgtgaaactgacaccagcctagcctgcctggaatggggaagggacgccagaatctagatcccttccatcttgttcgagggctctgtcctagaccaggctgcctgggcctcagaaaaatgaaggaagagaagccacattcatacctggagcccttctataagtgaaaaaattaggccaaggatgcagagctggggtcctatttatgagcatttactgtgtgcctggctcactgctaaatgttctccactgactcctcacagaggaaggaacaaccccacagctcagaggagaaaatcaaggcttagaagggccctgccacacagcgagtgaggaacacttgtgattcaaacccaggactcccaagatcctgtgagctttctccactttgggctgctcccaccaccccactgggtctcctggcccccaatccagggccctttcccatgcccaggggggcctcggttctgctggccagccatgcggggggcttctgaacttgcccagctgggcagctggatgagtggtagagccacacgccccctccccttgccctgagactctgggaagaggcgcaatcaggaggaacagacaataaagaacaaagaggccagctcgggaggggcttaggtcatttccacacacaagcctgagcagctggcctcataacaaggtcaggggctgaggctgcagtgggggttggctggtgaggagggagcccctgtgcctggagcagggcggggaagagccaggataaagctcaagagagaagagttggtttccccagagagagggacagggaaagggagggagcacctatgtgcataggacgcggacatttcacttcccataggctcctggagagcccctcctgaactgtacttaacacccccaggcctgggcttctatctgctgcgcctccgtgtgacctgtgagccaggccagttgattctcagagcctcggagggatggggacagcagcagccaccgcgcagggctcctctcttgtgaggaccaagcaggatagatccttccttcttctgtggtcctggacagccactgcctcaggctggctcctccgccacgggacctggtgcagagtcaaagatctttaagtcaatctgtagcatgatccgggtcccctaagctttcctaccaccgaatgtgtttcttggtatattgttcaattcccgttttacagaggaagaaactgacacactcgcttgagtatcggtccttcaagtaatgtggcctgactcatgctcaggttgctggatggctgccacagccctccttattccaaagaggcaggtggaccccacacatcaggcccagtgtgtccccagcttcccctcactggcctccctgggctgactgcaggatatccagagtctagccttctgctcccactgccccgtctgttccttctgctgggtggatacgccctgggctgcttagcccaccctgggccttccaaagccagagctgtggtcctcccagctgggattcctcccaaggtctcaactctggaagcccagggaggctggaacaaatagcaaatggccaaggtgtagggagacccaaggggaagggtctcttgaggtcctcctgtccattctctgttacatcatgggaagatggaggtcagagaagatgaaaccaggcccacttacggtccatgctacctcctaagaggtccagagatccaccccgactctccgtctccagcccccacttcaggccaggcctcaccttggacacctgcacagctgccttgcctcttcctggggctgtccatctctacctgccccccaactcatccttcgtgcacagccagaaggggccactcataggcattcaaaaaacttcacagggcccaccgctgcagcaggataaaatccaaactcattaacagagcttaatgccgttcatggtctgaccctgcagatacacttctgctctcatctccaagccacaccccactttcttgccactcccatcatcatgaattaatttctgccttgaatctgcctctctctctcccttacctttgcacttgctcttaccgctgcctgaaacactctttcatcttagccttccctactacccctccagcccggtcaatcctgcccatcctgaagtctcagctcaggtcacctcctccaggaagccttccctgactagcttgtttgggctgcctaggctccctgggctttctgctatcccactgcactttgatgagtaaagtccatttgctttactgtttgtccccatctctgggctgtgagctgcttggtgagccacagtgaaaacttggaggggaggctgggtgggtaaagaaagaagtcaggataaccctgatctctggcctgtgtggcaggagatgttggtgtccacactgacatggggacctgggtggaagggcagattctggggggggaggggaaacgatgttctgggcttgctgtgtctgaagggcctgcagggccatccagtggctatctctagagaagttggtgacggtcacctttgagagaggcctggattccagaagggagggaggggagctgctggggccttcccagcgtgtgtcagaaccactccctttcccaggcttgcagaagccctcactcaactgcccaaccagggtcctgtcacctcccccaggaagccagcctggccctgacaaagcagtgctctgttctcccccttgaccattactcgcctctggtctgaggacatctctcgggctctgccttagaactcttcaaggtgggagccacatccctccatgtcttgtagactccgcatcgcccagcacagggacagacacagagaagaagctgcatggacaaggagccctgccccttcccctggacacagccccagccagtgggattctggggaaaagaaaacacaagcctgaggagctttgggtcagattgtctcgggagagtgggggaagaggcgggtggagtgggggtggatttctgtccaatctggaagcctgtgctggatggccggatcgccagcaccccaggctcgaagcgttccagccggtgacctacattcccagggcgcctctgtgtgtgcgcacacgggcaggcgtgcgtgagtgcaggagctccacggtgtgtctgccagtgggcctctgtctcggcaggctgtctcctcaggagcccgtgagtgagcacgtgagggcgtggggggcccacactcctgctctggggttccacagactgcaccagaaagagttggtctgtgccctagaaaagccacagccagggactgcagggactgacatggctgggggtggctgtcccacccgcagccctgcccaagaccctctctctctcctcccatgctctctctgtgacaaatggcctcacactgctctttgctaatggtggggtgttaggcatggaaaatggagggcacagctcttaggtggcggtggagggcggggacctcaaacaacagcccgaggcagccagatggcaaccagaggtcagtagggtgggtggctcagcagagggagcaggcaccaggctctaggccctgcagcctgaggtcagggcgtcactcaggggtccttgggggctgtcccgggtcaggatcctcctgcctccaggcgggggtagaggtggagatctctccctcctgggaaggcctgtgcttgactgagaagctaagctgactctatggccctgaagccagggcaccagggaatctggggggtgggtgccctgctcagagaccctttagtctctcctttgccagttctgtggcgggtggggtaggggtggctgtcccccaaacccttctgagcctcttctttcagacttggtccctgacagcagggaggggatgggtagtcctttcagagactctctctgggtctatctctgtctctttctgtctctctatctctgttcctatctctctcagtccttctgtctcagtcatctctatatatctctctgtatctctgcctctctctctctctttctccctcctgctgggctccccctgctcccctcttccctcctctccccctagtgactcctgcaaagctccccttccccagcagaatggggaacacagacttggctgagggcctaccgtgcccggcagcaagagaaaagtgaggctcgagcccccgacagcttctccgtggcccttccaagccccgggggatttttgcttcagttctcctctccctccgtcaattccccagctgaggccaaccttggtccctgggctctgcacctcctgcccaccctcctgcctgtatgaggacccccccatcgacctcccttgctggccctttctccggccctgcaacgggcccaagtctctcccatcccatcctcactgcctcatcctctccggcctatgtcttttttttttttttttttttttttttttttttttttgagacgaagtcttgctctgtcacccaggctggagtgcagaggcacgatcttggctcactgcaacctccacctcccaggttcaagctattctcctgcctcagcctcccgagtagctgggattcccagcccatgtccttctgatctctgcttccccactggcattgtgcaactcaacaccactccctgccccaaagctgctctgaacgggcccaccagtggaataccaactgcagaatccagggctttctcttggggcaccatcttaccagtcctctcgggtgaggctctggttgggggtaggtcagggcagggtccctggagccccgcaccatcagatctctgccccttaccaggggaaatgatgtaacttctctgaatctcagttttcccacctgtgagatgggatggttaccctggtactcctgtcacaggttattgagaggagtaacactgttcatgcttatttaaaaaattctgagaactgatctagcagagaatgaggcctcagttgatcttggctgtagttataatcatttgtgtttgccattgcttgaatctctctcctacccccccaccctgaggaccccacagtctcctctcctgggtttcctctcgcctgtctcttcatcccctctcggtctttcctgtaggctcccagctaagccaccaggtgaccaggccaggccctctgcagtccccaccatccctcctcacatctgtgtgtcctcacacccctgcccactgcaggaccaagtccacctctgccacccacacctttgccagcccctacctggaccttctgccttgccggtaccacccagaccaggggacctccctaacataggctcaataccctcctcctctgtgcacctgaccggttctgctcagggctctgggggcagccctgtcacaccttatggccttgtccatcgatctgtcagtccacatgcctgtctctgccacacaccttggagcttcatctctgtggccctggcactttctgctgcatatttgttgaatgaataatgaatgaacgaatgacttgatgcaaatcaaagtactttgcaagctataaagcgctcctccaatcaatgccacacacagtggggtattaaggagcactcaaagcctcctgcaggacttggcctcaccttgcccactgcacctgggtcgggggaaggaaacctcaatcttccagaaagttctaatccttcatctgcctcaggatcattctgggtaggaacgatgcccagcctcgccctagagatttggattcagtttagtctaaaggaggcctgggcaatggaatgtataaacccctcctccttttttccctcctcccctgccccaccaggtgactctaaggggcagctgctggaattggaggaggattgttggagccctggtctttgctccctgcccaggttcacttcttttaatttgtgccttctctgtgctagctccatgctgggtgctagaggggaagcacgcacccagggaagcatgaggctgggtctctgctttagggaagagcttagaacaggcactcaaggctacagtgacatcccagggtggagagacctctaggggtaggtgggaaggagaagatgctgaccttaaagataaccagagacctaaggccaggtacagtggctcgtgcctgctattctagcacttttgagaggccaaaggaggaggatcgcttgagattaggagaccagcctgggcaacacagggagagcccatctctaaaaacaaagccaaacaaaatacggaggttggcctggtggatggaggtagtgaacaggcagagggaaccacaggggaaaggcctggagttgagaactacagagtagcccatctaagaactttttttttttttctgagatggagtctcgctctgttgcccaggctggagtccagtggcgcaatctcagctcactgcaagctccgcctctcaggttcacgccattctcctgcctcagcctcctgagtagctgggactacaggcgccaaccaccacgcccagctaatttttttgtatttttagtagagacggggtttcaccgtgttagccaggatggtctcaatctcctgacctcgtgatccacccaccttggcctccccaagtgctgggattacaggcgtgagccaccgcgcctggccgcccatctaagaactttgagtgattcagtgaggctgtaccccaaaatccaggtgcgcaggcctggagaggtcagctgggctggggtagcggcctcaaatgccgggatcaggagattgggctttaccttgcactgggaggagccatgaatagtttcaggcaggggaggaacagggttgtgctgggtcttcctggaattgctaagacccaaaccacccctgaggcagctcaggtgaggctgggtggctgcccacctctgggagctcacaatcccagcaggagaagcctagcccaaggagggaggccaagaagacccagagccaagggggtagtggggttcctggactggctaccttcgccagacctgctcagcctccagttccctgtttagtggcattaaaggtttccgtcccccaatgtccttggcagcccagtgcatgctcaacttgtgggggagcaggaggagggcagctctgactatcttccttgcaccttgcatcttcaggaggggagctagtcagactcttagggaacaagagaaagagaagggaaggtgcatgagcattttgtgccagagctcatagaactctggctggaaaacgtagccccattttacaggggaggaaactgaggcacacagagatttgtgatttgtccctggttgtactaccaggaagtgacagagtcaggatttgaactctggtcctgctggcttcaaagcctgcgtgcttcccactgtgtgcatccctgctctgagtctgcactgagcagcccacgtgcctagtcctgctccagggagaggcaggagaggctgtgtgagagctacaaggaggctggggtctctgctcacctcagcagtcccagtaaagtaggcaggaaccatgggagagattcgagcagaggagggacaggtccaaagctgcagccagaaatcgcctgtgctccagcccctgtccccagcccctcaatgccaactccccatccttcagctgaccccgggctcattaagtgctaggaaacgccaccagcagcgggtgcagggctgagggccaagctgccggctggaacaaaagagcttgtgtttggggataggacctccccctccttcaccacggttgggggccgtggggggaagtgaggacagtcatctggggccaagaggggctgcagggctggggaaggggcttgtcagagcccggattcagatagaaagggctgaaagggggttggaagctaatgtgcctgagcgtctcagcacaaacgggccattttcagcgggcccagaaatcaaaacatcccggctgggggagagcaagctttgaacttttcctgactcgtggtcctgggggtgaagaggtcagggactgccttgaggtgggggccaggccagggtgggatgagcagccggcagcccaaagcccccttccttctgtccccatgctgagtctcagagggaaccagggctgctcagagcattcagaggagggtgcgggctgtggggggtgagaaggaagggaagccccattttcactgtctcctcactcccaactgtgggcagccaggtgtgcttctacattgcaggtctggccccacatcccctgctgcagacctccactggcgcccccgtgactctcaggatctgttcccagctctggaacaggctctccggacccctggccactggcaccctgggcagcttacctcgtcccactcctgatagccccccaatgaccactttatgcttcagccaaatctagctgttgacagctcctcaaacgcttgggctggctaagcctctacagtttccatgactctcttctgagccggaaacacctgcctcctccctacgtgcattcattcccacccccgaaacgggacaaactcctactcacatgctagtgcccttttgctcaccactgcctccagaagccttcccagcccctgtgaatgagttcttagtgcaatggtggccacagtcactgcaggatgcagctgtctccaggtgaaggctctgccctgcgggcagccctcatgtgtgtctcattcccctgtagccttaggcttgggacagaaagcttgagaccagtaaccagcgagcatttgttgaaagaaggagaaggggaaggagaaggagccacgaaaacagaacaaaacaaaacataattttagaaaacggagaagctggccggccgcggtggctcaccccttaatcccaacactttgggaggccaaggtgggtggatcacttaaggtcagcagttcaaaaccagcctggccaacatggcgaaaccccgtctttacataaaatacaaaaaaattagtcgagcgtggtggcaggcgtctgtggtgtcccagcaacttgggaggctgaggcaagagaattgcttgaacctgggaaatggattttgcagtgagttgagatcacaccgctgcactccagcctgggcaactgagtgagactctgtttaaaaaacaaaaaagaaaagggagaggccaagaaagagaaaacaaatgggtaacaggggtaggggaggagccggctcttctggccactgaggaacgtgccagaacagacagactgcacaccctgagcatcagagcaatactatttctctgtggtgagacccctggacagctcagtgccccagaggcagggtcctgggcacaggctggctttgctggcaggcccctctacagtttagccaacaaggcggggcagctgttgggggggatgggtggggggtcccaggtgggcatttagctgcccgcatagcacttcggcatcacctgccatccgtggatcccagattcctgtctctaagagccccaagagcctataggctctgtctaggccagtggttttcccgttgtgtccaaggagaagctcagaagttggcgtgtaggagacacttccttccttgaacccagcttggactagagcagctcaccagatccaatagaatacaaacattgacgtcaggcgtggtggctcatgcctgtaatcccagcactttgggaggctgaggtgggaggatcacaaggtcaagagtttgagaccagcctggccaacatggtgaaaccctgtctctactaaaaatacaaaaaatagccaggcgtggtggtgcacgcctgtaatcccagctactcgggaggctgagacaggagaatcacttgaacctggtcctgtggaggttgcagtgagttgagatcgtgccattgcactccagcctgggcgacggagtgagactctgttcaaaataaataaataaataaaaacttttttgagatagattacaggtgtgagccaccacgcccagcctcaaaataataatcataataataatacaaatgttgggcttgcctgaaaattttcatttaaatgacggttctggatcacttgagcccaggaatttgaggctgcagtgaattataatgtgatcacgccactgcactctagacagggcaacagagcaagaccctgtctctacaaaaaaaaaaaagtaaataaaatgggagttccatggctcaagtagtttaaagaacactggtctaacctcttccccttgtaaagactagaagacaaggcctagggacaaacaggtttcatcccaagtgcccagggaggacagggtgacagagctacctctagctcctggcccctcctgctggaccacacagccctctgttgaaagtataaacatatgacggaatgatcaggaatctgaaagtaggttttgttgggtaacagggaatagcaacaaaggacacttagtttctggggcaaagggtgggaagtagagaagaggaccaaagtgggaagcggggcgcagagtggctggagggggatttgtgggaggacaatcaccgtgcacttagttaattaatgatagctaggctgctgccaaagccattcaaaaccatgccgtaaatttcccagctttggacaaggcagcactaggtttatttttatttatttttacttacttttagaggtggggtctttctgcatttccccagctggagtgcagtagctattcacaggcacgatcctagccaactacagccttcaactccaggcctcaagctgtcctcctgcctcagtctgctgagtagcttggactacaggcgcgtgccactgtgcccagcagcactaggtttagaatcagaatctcagggttcaagtcccaactcctccatttatctactcactgcattgaacttggccaaatcaatgacctcttgagactcagtttcttcctcaataaaatgcggccaacaacacctctgtcccagaatggcgaggggtcaatgagagcacagagtcgaggctgaacaattcctggtgggttcaggattcttccttgcataggaacttggggaaggttcaaatcccagctctgtcccttactagatagatttgtgatttgaggcaagtttcttaacctctctgcctcagttttctcatctgcaaaatgaggataatagtagcatccacctccctcacaggatgtaatgagttgatacggattaaagcacttagaacagggctgcacgagggtttgttatcattatttggactctattaataactgcaaagattaggtcttgccaaggagagatggtagaaatggaataaaagagtgcacaagattggctgggcgcggtggctcacgcctataatcccagcactttgggaggccaaggcagacagatcgctttgagctcaggagttcgagaccagccagggcagcaagatccctgtctctacaaaaaaatacaaaaattagccagacatgtggtgcatacctgatgtcccagctactcaggaagctgaggctggaggatcacatgagaccaggaagcagaggttgcagtgagctgagatcgtgccactggactccagcctgggtgagggttagggatttaaaaaaaaaaatagaatgggttaatgaatgaatgtaagaaaaattagggttctaccaggaaccctaattacggatctaacttgacccgatcctaacccatcagtggcttccagtcattcctctgggctgggagcccaccctggctccctgtcgctgggcctctccctgcatttttctgcacacacgtagaggtaggctaccatttcgcccctagatgactttgggtgataaagaagtaacttcagcctccttgaattgaatcttctatccagaacatgtaacaaacctggaaattggaattgccctaaagctgattattctgggagggcacctcctggcattaaaactaaattagatcaaggtacctctgttattagcaaaataattccctatgattaccgaacacagccatgaatcctgatggcagatgaacttcaggtgacttacttgagacaaataactgtgcgaaaatcacaggctcatcgaatcacttctctatagcgttgcagttgggtaattatgctaatagttataagaaatcatcctttgtggtctaggattgggagggcttgagacggaaacgtaagtggcagatattacctgcttccagttggagagactgggtccaaaatgggccccttgcagggagctgcaagggagctggtttgtcccctgtctacaggggagaaacctgttatgcagcctgaattgcagtggcctggcaccttgggaggctgaggcaggcagattacttgagcccaggagttcgagaccagcttgggcaacacagcaagactcccttctttacaaaaaaataccaaaattagccaggcaaggtggtgtataccttcagtcccagctacttgggagtctgaggtgggaggatcgctttagcctgggaggtggaggctgtagtgagccatgattgtaccactgcactccagcctgggtgacaaagtaaaaaaaaaaaaaattgcagtgacctcattaagcatcccttttcagatcatcttaatacaggaaattgaatttgtccaagttccactgttgggcatggtaattccaagaagcaagttaaactgtaaaagctcaggacctctgagtcaatttgattcagcaaacatgactctgtgcccactgggtgccaggcagtgatctaggcacaggcagcgggggtgtcagcattcaagggtgtttctgatgctttcttaacagtctcttgtcccctcagtaacctgacgaaaaagacaatattgtgcccattttagagacaaggaaatgaaggctcggagaagcgaactggtgctactgctgataatcagtggagatgactacttccatccacccacagggaatgtagatctgggaggcttcctggaagagcggatttgggaaagtgcagtgtaggcagaggaaacagcttgaggaaaaaacccggaggcaggggattaaagtaggggttcaagaatggggttgaggccaggtgcagtggctcatgcctataaatcccagcactctgggaggctgaggcgggcagattgcttgagcccaggagttcaagaccagcctgaccaacatgatgaaatcctgactctactgaagagacaaaaattagccaggcgtagtggcacatgcctgtagttccagctacttgggaggctgaggtgagagaatcacctgagcctgggaggttgaggttgcagtgagccaagatctcattactgcactccagtctgagcaatcagagtgagatcctgtctcgaaaagaaaaaaaaaaaaaaaagaatagggttgagagggtagccgaaggtcaagaaacagagggcctcaaatgaccaattgagggtttggacaatggggagccaccagaggtggttgagtaaaggaggagtaagatggaacctgagaatgcctgggtgagagtgtgggagacccactggtagataaggctgcttacagggagggggccaaaaggggataaaaaatgggtagttttttcagtataagtgtgtcccaaatattgcataggatatacttacactaaaaaaaattcattgtttatatacaatttacatttacctggcatcttgtatttcatctggcaatcctacccccatctcctcacatcagtgcctagctgggttctctgcccatgatgactttcccttgtgggcacacagcctggtaaactcctatccatgcgttgaagccctgaactccttaccactgctgtggcaataattatcatgcactacggtgattactttcttaggtaattgttttactatctacccatccccttagcggcaaaccttacttctggctgcatagggaaaaaaaggtcaagaccgtgagtccttccatttcctgacctcctccccaccccaagttgcttccaacttctgcttctgtctcaagaagagccggcctctccatccctcctgtgaccttgcctgatcccttcagatcaggcacctcttgagatcagtacacctctctcactggcagccccaaaatcagacattctgctgggtcattcccaccagctgggcacctagcgagtgcttcccgtcctcctcatcccaactggggttccccaggagcaggctctgagaggtattcatgcataggagatccatcaagggctgctctctggctcaacacctgtggaagggaagggaagggaagggggaaaggggaagggtgaagggggaagggggaagggtgaagggggaagggaagggggaagggggaatggggaagagggaagggaagggaagggaagggaagggaaggaaagagaagggagcaggactgggcaggaggaggaactgagcttccatgcagtcagtgcaagcctcagcccaccctacacctggagctgggatgccccttcagagtcatcctgagctgtgccaaacttttatgaccctgggttggtcagtcactggatgtaggacaccccaggaaggaggtgtcacctctggggaggtggctgtcttcagcagaggcaacccccaagagctaagcactgagggactacttctagcagcctccccatacctaggggagtgagacctttactcctgaagaggagatccgggttgcacatcacaccccctaccccccaccaaacccaaggcattcccctccagcaaccatccaatctcttatcttccttctgacctaacccttcctgtcctcccttccctgcctcctactcactccccagatttttgtaaaactcaagagttggctctgtcccacccccggcgtgatatgatcggatctgtgctttgaaaacctgatagggagaactagtagacatggatccacatggagaggggccagtaaggtcgctcagtagccccctcaaggtctctcagtagctccctaaggccaagttgctgagcatggcatgtagggtccctcatggtgcagccctgcctcttctcctgccccctctcatggctgctcccctcacttgaggctccaataatacttgactgtaattccctgagcacgctggctgtttcatggtgccatgtttttttatgggctatttcctctttgcctggctaacttttctgtctcgcttccttaaagacacactcagaggtcatctccttggaagcctttcctggagccattcctgccccgctcccaaggctggtagcagagccgcatagctgcccacctgtgtctcagccattaccagcagtgctcagcagcatatgggagtgtcctgcttggggaccacctgatgacattgttacctgtctcttccccctgcatctgtgtctccagcacccagcccagagcctggcacaaaaggagccgaatgacattgacttaggcacgtggagaatccatggacagccgcctccccagaggtgacagctccttcctacactggtgctctacatccagtgactgaccaacccagggtcataaaagcttggcattgctcaggatgactctgaagggccatcccagctcccgatgtagggtaggctgaggcttgcactgactgcatggaagctcaattcctccttctgcccagtcctgctcccttcccttcccttcccttcccttcccttcccttcccttcccttcccttcccttcccttcccttcccttcctggggtatgagagaaactgcggaggtggaatcaaagcatctgagaatgattagactcagacagggatgtgtcccctcagaacaggtcttccctggaaacagctgttctcctgttcagtatcacctggtccttcctccatgcatagtgtctgacatcatctcattctctctgggtattgaattctcaatgcctcagaggcagaagtgaggtctgtgcatttccactacttatgctccgtgaccgtcatgccccacacgcacactagatcggagctgctttctccttctggcccctccttcccactcctcccctgtcattcatactatccctgctccagggtcttgtgggcctgggtcttcatcctatgatgcttcagtcactgcagttttgagtttcacttccatcatcaggtaaggacccaccaccccagcctatctgtgaaaagggtgttgtggttacaaaacccaggatctggaatcaaacagatggggcttgagaacaggctctgtcatctacatgctgtgtgatcttgtgcaagttgcttaaaatctgagcctcagtttcctcatctgtcaaaagggaatagatactagaaccttttcagaggcggtcgtaagaattaaatgagagagcatctggcaaagcactcaaacttgcattcatagcaacgggcagaaatgtagacatttctggcaacaaacagtatccaacaacaataaacagagcctattgatggaggtgggaaagcagacgtgccttcactcattcattcaacaaacattcattgagcacctactacatgcccttgctgagggtaggaggggatacaacaatgaagaaaaccaggcatgatccctgtgtttagggatgcccagcccgggagcatgacacatccatccagtgatcacacattgaagatgccatcaccaactgcaacggacaccataaaggaaagtgacttgagccatgggtgtgtcatgtgggaggccagggaagccttccctgaggaaatgacattaggcttccattgggagaagttaactgggccaaggaatggagaaaagtgttctgaagaggggaaactggtatgcaaaggctgtgtcgtgggaagaagcgttgtatatttgaggatctggaagttggctggagtggctggaggcagagagggatggggaagatggcaagaaatgaggctagggccaggcatggtagcttatgcctgtaatcccagcactttgagaggctaaggcgggtggatcacttgaggccaggagttcaataccagcctggccaacatagtgaaaccctgtctctaccaaaaatacaaaaattagttggttgcagtgatgcatgcctgtaattccagctactcaggaggctgaggcacaagaatcgcttgaagccaggaggtggaggttgcaatgagccgagatcgtgccactgcactccagccttgggcaacagagtgagactctgttctcctgccaagaaaaaagaaatgaggctggggagatgggtaggacctgaccacccaggatcttggaggccacatgatggcaacaagaaaccattgaagctttgaacagaagtgagggtgatatgattggatctgtgctttgaaaacctaatgaggagaactagtagatagggacccacatggagaggggccaggtggatgcatggaacaagttcagttcttagcgaagtccaggcaagagaccacagtgtctgcactgggctggagataaacatttgggaatcatctgcataaggacagtggttgaagccatggcctgggtgtagttcaagttgcctgtgcagagagtctagaaaaataagagggactcagacagtctcaaactccaagttttacagcccaggggagtcagatgaggtagccaaggaggagaagtgaccagagaactaggggacaaactgggagagtatggtaagatggaagggaacagaagtttctgtggggttaagtattgccaagagatcaggagagatggaggtggaaatgtatcctatggtgttaccaacaaggaggtcattggtgaccttcccgagagccattaggaaatactgcagatctggccaggcgccagtggctcacgcctataatcccagcactttgggaggccgaggtaggcagatcacttgagatcaggggtttgagaccagcatggccaacatggtgaaaccccatctctactgaatacaaaaattatctgggcatggtggtacgcacctgtaaccccagctacttgggaagctgaggcaggagaatcacttgaaccctggaggtggaggctgcagtgagccaagatagtgccactgcactccagcctaggtgacagagcaagactccatctcaaaaaaaaaaaagaaaaaagaaaaatggcagatcttaagctgggtcagcttcctgtctggctaggccgtttgcatgggacaaagtgccccagtggctaatgtccatgtcaccaggataatattacattgtccagagagatctgaaccaaagaagattggcacattagctcagaaaatctcattggaacccttgaagtacatgttgttcttttccagtgaccatatagccctgtcaactttatatatttgttagcttgtacaacatgtaacattagccaattcatcgtctagagtctgaaccataagcaatttgctatcctgtgtgttgccttgatggaagaactcgacaagtggacatacgtggattttgcagatatagtgcagacgatgcctttggcaaatcactccagacacatcccttggggaaggtgctgcaggctctgtcgcccctacagatggaagctgacaaggaaaagacgggtccagattggaatccctgggctacatgtgagaacagactggagggtgccagagcggatgggcagacagagaggagggtctttagttctacagtgttgtacagcgcctcactcagggggtggcacaaaggacaggaggaaagagccccagaagcactaacttcatgcatatttttgaccttctcatctcctgggccagcctccctgggtgtggttttgttcagaactggagaacgcgcctgaattttttaaataattgagacagggtcttgtctgctgcccaggctggagtgcaacggcatgatcatagcttagtgcagcatcaaactgctgggctcaagagatcatcctgcctcagccttccaagtagctgggaccacaggcatgctcaccactgtgcttggcttctcttggaattttgttgttgttgttgtatttcttgagacggagtctcactttgttgtccaggctagagtgcaatggcgtggacatgactcactatagccttgacctcctgggctcaagtgattttcccaactcagcctccctagaagctgggatcacagatgcatgctaccgtgctcggctaattgtcttttcaattttttgtagagatggggtcttgccatgttgcccaggctggtcttgaactcttgggctcaagcgatcctcctgtcctggcctcccaaagtgctgggattacagacatgagccactgtgctcagccccctggaatttttgatcagcctcccactttctttctttctttctttctttattagttttattttattttctttttcttttttttcttttttctttttttttcttttttttttttgtgacggagtctcactctgttgcccaggctggagtgcagtggcataatctcggctcactgcaacctccaccttccaggttcaagcgattctcctgcctcagcctcccgagtagctaggactacaggcatgcaccaccacacccaggtaatttttgtatatttattagagatggggtttcactattttgaccaggctggtcttaaactcctgacctcaggtgatctgcctgccttggcctcccaaagtgctgggtttacagacgtgagccaccatgcccagccctcccactttcatagtaacctgatcaagttctttccatcctcccctgtaaacaacttcctcttgaccatagtcatataattgctacctgtaccaagaaaggagccatgcattttgccactatgatctcattgaatctttataataacccttgtgataatctctagtcaatgttggctgtgtaaacccagcaacaggctcagagggatgtagtagcatgctctaggtcacacagctggcaagtgggtcagcttggatatgaatgcagcattttttttttttttttttggagatggagtcttgctctgtcgccgaggctggagggcaaatggtgcgatcttggctcactgcaaccttcacttcccaggttcaaggggttctcctgtctcagcctccctagtagctgggattacaggtgtgtgccaccatgcccacctaatttttgtattttagtagagatgaggtttcaccatgttgaccaggctggtctcgaactcctgacctcaggtgatctacccgcctcggcctcccaaagtgctgggattataggccccgagcactctttgactttgaagttcacattcccatcaagaacactcaatgaagaccaagcagtcagtccagcaggtggtggggttgctttttccttttgacagtttggaatgatcccttttggtttctgagtttttgggtcactcagtccttttcttcattcaataaaccttcctgaggccaggcctcttgcaggtggtggggctgcaaggtttgcgacctggaagagctcacagtctgctccaggacacagacccatagcaaggtgcaacaatctacaatatgataaatatagatggtggagtgggtgggttctgtgggaaccctctgctttccatgggctggaatgcctgagctggattataataggagaagtaggcactgactgggtagagatagggaggacagacattctaggaagagtaaacagtgtgtgcaaattcctggggcatgatagagcttggtggacttgggagacctggttgtatggtggtgcttgggcgggggcagtctcagctgactgggactagggtgtgaaggaccccagtgaagattgcagactgggctattcatgttcttaagatttactgagcacttcctcatgagccagtctttgtgctaggtatttcccagaaaggatgaccaggttattaaaatacggaaactgaagttcagagtaggactgggttttatgtggcctcccaccatgactctctgcaccttaaaaaaaaaaagtgatgaagaataaaacaaacactgtgtgtctcctatcctggtcaagaaataaaaccaagcatgagcatggtggcttatacctgtaatcccagcactttaggaggccgaagcaggaggatcgtttgggcccaggagtttgagaccagtgtgggcaacatagtgagaccttatctctacaacaaacaaacaaacaaacaaaaattagcccgccatggtggcgtgtgcctgtagtcctagctactcaggatgctgaggtgggagaatcccttgatcctgggaggttgaggctgcagtgagttatcattatgctactgcactccagcctggttgaaagagagaggtgctgtctcaaaaaaaaaaaaagaaaagaagaagaagaaagaaagaaagaaaaccttactaagatgtgtgaatgtgtgaagctccttcctattaaacatctccctctatccagaggtaaaaactttgcagaatggtgtatttatcattcctctgaatgtctttatacttttaccatatctgtgcattcctatggaatatatggtattctgttcggcatgtttaaagaatctatatgaaggctgggcatagcggctcatgccaccagtcacgtagtttgtggaattacaggaatagaacttgaagccagggtaggcacagtggctcacatctgtaatcccaacactttgtttgggaggctggggcgggaggatcgcttgagtccaggagtttgagaccagcctggccaacatagagagacccctctctctacaaataaaaatattaggccaggcgcggtggctcatgcctgtaatcccagcactttaggaggccgaggcaggtggatcacctgaggcggggagttcgagaccagtctgaccaacatggagaaaccctgtctctattaaaaaatacaaaataatacaaaattagctgggcatggtggcgcatgcctgtaatctcagctactcgggagactgagacaggagaatctcttgaacccaggagacagaggttgcggtgaactgagatcgtgccattgcactccagcctgggcaataagagtgaaactccatctcaaaaaaataaaaaacaaacaaacaaacaaaaaactagctgcatgtggtgccactgcacctgtggtcccagctactcagaaggctgtggtggtagtattacctgagcacaggagttcgaggccgcagtgagctatgatagcgccactgcactccatcctgggtgacagagcaagcctctgtctcaaaacaaaacaaaactatatgaatgatattatagaaatttgatgttctgcaacatgttctccctccccttatttgagatttgagattcataatgaatttctaatcatttatttttgctgcagtatagaattttgctgactaccccacaatttgtttatgcattcttcctctgatagggatggaggctgtttcaaattccttactagtattatcattattgcaatgagcaagaggttctctatgtcaagactctgggtcactggggtatgtgcacttcgacatttctagatgctgccaaattgtttcccagagtggctctacccatttccactcctgcctgcagcacaggacagttctccagactccaggtccctactgtcccacttctttgtttttgcaccaatctgacaggcatgaagtggcactttactgggattttgttttatatttctctgattactagtgagactgaccatctttgcatatgtttattggccattcatgtttctttttctgtgaattgcctgttcatatattttgcccaatctcctattgcctctttagcacattggtttgtggaaggcctttgtatattttggatattatattgtaaatatcatcttttgataaacagaagttttgaattttaattaaatgtattgatgtttttcttgatgatttatgcttttgaggtcttctttaagacatccttgactattatgagttttttttgtgtgtgtaagttttcagtacacctggaactgatcttttatgcatggtgtgaggtagggattcagctcatcttttactaatatggacattctattgctctagcaccatttatagaaaagtccacccttctcccactgacctgcagggccatctctgctacatatcaagtttccatacctgtatgggtcaatttttgcagcctctattctagtccactggccaatttatctacccttgggctaataccagatgctgtgattgtacattttggggtccttagcacctcctctctcgaattagaggagtgctagtgacttcctgagagtagaaacttgtgttcacctttgcagctctctcatcacgttttacatgaacatctacataatgcttttgtttacaaaaggatttcttgcatactatctcttggagttctaaaactccctttttgcagaagataaaactgaggcagaaggtaaaactgagaagataaaacagaggtaagatgatttgccaaggtcgcacagccagaaagtgttggattaggggttctataagatttcaaagccaccctgtgcatccatcgcatatgctccgaagacttccactgaccctggtatcggatttcactccttcctgccttcattcaacaagtagctcctgagtgatgaccgtgccagcttctggtgggtgctggggctgagaccccatttctgggaggctcttcccagtgctggagaccggtgggaagggtgagacagtagatggacattttatgggacatcgtctgcggcttggcatcagcatcaagtcgcgccaggtttcagagccaatttaaagagccccatttttggcgtgcagttgggcccaggcgctgtcttcagagaggacgctggcttccccctggaattacaggcgtcctcccgccctcccgcctcgagaggcaggaatgcgaaggatcagctttcagcagagctccggctgccgttcggggagttcaccgtgcaggcccgtccccagcggccgaattaactggttctgtctgtacgactgggagagcagctctcgctaaaaatagcgccctgcccagctcgacctgcgagccgccgttggattctgagccgggacggctcaaggagccgggagccctgcacacccctcaccccgggcctggcccgggaccgaccacggaggcggaggccgcgggcaccgcgctggccccacaggtgccgcggagggtggcaggcccgctggccgaggcactgccgaggccgtccgagatgggagctggcggtgcctccttccgcgccctcgcctgggcctccctgcccctgctggggcctccagcctgcgcgctctgcgaggacacgctctgctgcggaggtaaggccgtgcgcctccaggcgcgccctcgccctacgcgggcacttgcccggggcctgtttctcctccttggccccagatccgcgactggcggcaaggtgaggacgaacacaggcatccgcgtagggctgggaaaaggaggcaggagctctcagcaaacccacctttagctggaaaacgtcgctgtcccgccaccacggtccgaaaagcgttcgccccgctctggcctcagtgtgcctatctgggaaatgggtcaataagatagtcacgctttaatattcagtcacgcttgctgaagcgggtcgcagacgttcgcgggacgttccctccagccagctggagtcctcgggagtttctgttggtgggagtgctggggtgccttccctgtgacaccccgcactgtccccttcccaagctctagttccccccattagtccccggctcctgaggttggagatccacgcagggcgcacataaaagtttaaggggtcagcggatgcgggaagattctagcgggaaggggagctgtagggtggaagagggataagtaaagcaaagtcgcggcccactcctcggtcccgtaccctcatagcgccgaaacggaagcagaggttatctctggactcctggaggcctggggactccgggaggggagggggcgtgtggtcccgccggcatctcgggccggcaccaggctggggagcgtgtgctcggagcggagggcctcggctctgcccagtccggcctgggcggggcggtggtggggaggtcgattgaccaaacaggtgcgcccccgcccctctgctccccgcccgcgctgggtcccgggcctggcgggcggagctgtgggcggctgggcctgcgattggcagggctgggcaggccgggtggccgcgggagcccgggagccgtagagcggcggcgccgggggaggcgcggagccggccgtagcgcgctcctgcctggccagccgcctactccgcccgccccgctccactcggcccagctggcgcgaaggaaactttcctgcagccgcccggcgacaccgcgactccgccgcttcgcaaccctggccctgggccgctcaggctccggagcctttgggatggcagcgcccagcggcccggcccgcgcgtagaggtaaaagctgggggccgcggctcaggtggaggggggctcggtggtttgccgggatccgagcggcatcccgggttcgagaggatccgggggctccgatgcgaggtgttggggtaggggactgaggaatgggcggcgactttgctttatttaccccgcttttcccctacagtcccctctcccgcaaggaaatctgcgcgatgcattgagcctttaaactttcctgtgcgccctgcccagatctcgaccgccgggacccagggctggcgctgggttcttgggagagtacaatacaggggatcgcgaggaaggcgcccccagctggggcccgcgggcggcgggagttgggggtggggggtgccagcctaccgatccccaaggcttccagcggtctcccaaacttcagaccttcctcagctcaccctgggaattggtgatagggcagccaaccaaacctctttatccagagccaggcaccccctggggcacccaagttttgggtgtttttgttcaatcctggccaatcctaaattatcagggaggcgattggcagggctgggtcgttgaagtgaggtctcttttccgtttcctgggctgctctggaccccaccttccgtgaaaacaccttgggctaagcagagtgggaacagggaccaacgccacctgcttccagtgctcagcctggtgggaatgactgcagggtgttctggtctcaggatggtccactcttgagctatctggtgtgagccatatggaaactcctctccctctggccccttctgctattaaggagggaaattttaccttaattttgattgtgagtgggtgagtaggtagcttgtcaccaataaggaccaatctttaacattagtcctccttaatgttaactcctttccgtgttttactgacccaggacagaatacctaagagtaaaaaaatggaaccaaacacctagctctggagcccagggaatctgggttccaacatcagcccctgctgctcactagctgtgtatctgtgggcaggtttcctaacctctcagagctcaagggtcccgtccaagggggatatagggaggttttttcgaggtgaggcgtagaaggcgcctggctcgtaggacagccatcttaagcagccgatctataccctggagcctgtgccctcttgctgtctgagagagccagcatccttgtgcctcagtttcctctcccccagaaagttggtaaggaccagcccctcttaatcagcccttttgagaaaagtgcacagatgcacacacccacaatttcagtgggtttgtaggctcaggtttaaacagcctcacacattcttatccctgcaatgaactattcagaatgtacaaggcttctgtctatcttgatctttccccctttccccaccccttttagacacctggaggtaactattgtaaatggcaaggaagagcaaatgaactaaataaccagcatgatggggaaaagggctgacctgcagaacctggcccaaagtcaccttcaagatcacctggccctcctatccccgcattcttccttccctggtgctgtgtccccacttggtgaacatctagtcttttttgctaggatcctctagtgacggtgagttcactagacagttggtttcatgattgggaaactcttggtttcatgattgagcaacattcttcctgtttgggacagaaatctttgtctctatgacttctatccactggttctggaacaacccttggggcatttcttactgtctcaattattcactgtggtcccctggtgcctggcattctgttccgtcccttcagcattcaacacacaggcactgaggttggtaatgatcatagcactatttattgagtgtttattatatgccagaccctgccctgaggactttacacatattattttcttgcacccataaaacaaacccatgaggttgattattttcttatccttattttgcatataagaaacaggtttagagaggttaagggacttacccaagatcctacaactggtaaggggctggctgggctgtgcaccaaactcagcatctgtatctgtctttagagcacatgcttcgcttttgatccttgcttgcatacatgcctttgtgtgtgtgtgtgtgtgtgcgcgtgcgtgtgtgctcctgggactggtgtgtgccagcaatgcttttatcacaagcacctagagcacctgttaaaatgcagatccctcatctctactccaggcctgggatctccactttaaaccacccgccactcccactcccccccaacccaggccattttcctgcaggtcacagttcgaggaccatagcactaaggtactcttaggaagagaacgtggaatatagttttcaacagatctgaatttagtcttggcttcactctctggagctggttactcttcctttctagggctttctcccaacttaagatgggtatgctgttccacccactggtgggtggaatggagcaggcccttggctgacgggagccctggtgaagtttctcctgccacaagtggatgtacttgcgggcagacctgtggcacccccaagatcactggcctctgctttctaggattggtgtgccttagacgaggccctcgtgctcaggttattatattttggagacagggtctcactctgtcatccaggctggagtgtagtggtactatcatagctcactaaggcctcaaactcctgtgctccagtgatcctcccacctcagcctctttagtaactgcgactacaggcacatgccaccatgctcagccaatttttaaatttgttttgttttgttttgttttttgagatggagtctccctctgtcacccaggctggagtgcagtggcgtgatctcggctcactgcaagctccacctcctgggttcacgccattctcctgcctcagcctcccaagtagctgggactacaggcgcccgccaccacgcccggctaattttttgtatttttagtggagacagggtttcactgtgttagccaggatggccttgatctcctgacctcgtgatccgcccacctcggcctcccaaagtactgggattacaggcgtgagccaccgcgcctggccaattttttaatttttagtagagatgaagtcttgctatgttgctcaggatggtcttgatctcctaagttcctgatgctcctgcctcagcctcccaaagtgctgggattgtaggcatgagccactgtacccagcctctgctcagttttttcacccagagtggtgaggaccctggaggggttggcagaaacctctccctcccctcaacaccttcttcctccatcctcctactgtggcctctggccctcccagccagaaggtgctgggcctgcatctcgcggggagaggagcggggtggttctgttgtgcgtctatctatgttttcaatctccatcccttcccttggaagaccgctctgtgggccattgggcagctttggggaaatgtctggcccgaggctgcctggcctgggctgactcactaggagagatacagggtggaggaatcgcctgcatagaccccagctgtatcacaattctggcctaccagctgtgctgcagacagggtgcttgttctgccttggacctatttgatcctgctgaaagcacaaattattaaacacccattttatgaaagaggtcactggagtccaggaaactgcagtgacgtgtccaaagccctaatgtgtgtatgtgggcaggggagggagcggtgataagagtcaggacctaaatccaggtgccttgacaataaggcactctggccttttttgcagtcttgttcatgcctcactatttttctgccctatctggttgtggctttggtgccagagccctcacctggaagcttgaagacctgggccacgatcaggctgtgtgatcttgggcagggctggtcatctcttaaaacgttaggtttcttttctgtaaaggggctgaaggtggggctttttgtccagatctctgaggttctttcccaccttgacatttacaagttgggctctgtctgcatttcctgtctgggtttctagggagaggtattcatgatgggctcagggcatgggtgaggggttgagttgggctggagggcagagtgctccatgggaattactatgaaaggggccagaaaggctcttatgggaatggtggccagtggggccaggacacctgggggcagtccagagggggacaggtagtggaggaagcccagggaagggggaggtcacttaccttagaattacacagtgttttgcaccctgatccttgcaagaaggtgatggtgggaatgactgggggtcaagggcaggagccaagggggagcgtgggggcactagggccaaccccactgcaggccctctcagccctgggtagtcttgaccaggagacaagggggacatgtaagagccttgtctcccttccaagccatcacatgtctctcctctgggcttcctcagcctttcctgaatctgacctgaacggttctaacctctccctggggcgagcagctggctgagggggtccagctgcctgtttcccatcccaggtgggcctccagcaacccagcttcctacagtagcccttagtaaccacagcctctgctggccacttactgtcatgtgagtgacttcctgttaaccacgagatcaaagccaagctccctggcctggcaaacacggccccatgtctggctccagttttcctccctgcctcttctttctctgctcttcaggttttatgttgcctggacttggcctgtgacttccagaatgcccttttctctctgccactgcttactgcccaaattcttcctgcccctctgggtgtagcaccaatttcacctccatttgttctcattgcccccctaagggtgagccgttcctccgggcttgtagctctttcttactaactgccctgctttgcctgtcgttgtccgctgcctgtcccccgtgatgggctctgggctttagaaattgctctagtgaatgccctagtgaatgcttggaaagctttgtagagttggactagctttgaatcaggcatgatttttccactcctgctccaactgccgtgcctgcacccccctcctcaacagagtcaagtggagagcctcgcagtctgctctgggcagggctggctctagcaagggacagaagagagatgcctttggtttgcagagaacttctctgcctcatttggatttttgttttgttttgttttgtttttaattgagacacggtctccttctgtcgcccaggctggagtgcagtggcgcgatcttgactcactgcaacctccgccttccaggctcaaatgatcctcccacctcagcctcccaagtagttgggactacaggtgctcgccaccatgcccagctaatttttgtatttttttgtagagacagggtttccccatgtttcccaagctggtctcgaactcctgagctcaagtgatccacccgcctcaggctcccaaagtgttgattacaggcatgagccaccatgcccggtcccatcatttggattgttcttgatctgcttcttaaaaaaaactttattctggctgtgtggcatcaagggggaccggcctaaaagcaggttagggaaagccacctgtcagtgtcagtccccacctgcaggctgaatttcaggtctcaaatgagaatagccaaattcacctgcttctttagaattattgttggttttttttgagacagggtctcactctgtcactcatgctggagtgcagtggcatgatcttggctgactgcaacctccacctcctgggctcaagtgatcctcccaccttagcctccctagagtatctgggactacaggcgcttgccgtcatgcctggctaatttaaaaatttttcttcttgtagagatgaggtctcactatattgcgcaggctggtcttgaactcctaggctcaagcaatcctcccaccttggcctcccaaagtgctggggttgtatgcatgagccaccgcacctggcttctttagcattttcttaagagtgtttaaaaagtacttgtgaagggcctgtgggggttattgggattgtgtcgggggcccacagacatggtccccacagacatgaacatcgaggagtcacataactgttctggggttgcacagttatttgtggccagaaagtccacagaaacatctgtccctgagttcagagagggctgttgagtctcagaggccaaaagggaaagaaaaaaatgaggaccaaaaatatatactaaggttgggtgtgctggctcacgcctgtgatcccagcagtttgggaagccaaggcgggggatcacctgaggtcaggagttcaagaccagcctggtcaacatggtgaaaccccgtctgtaataaaaatacaaaaagaaaaaaaaataaagaaagaaattagccaggtgtggtggtgcatgcctgtaatcccagctactcaggaggctgaggcaggagaattgcttgaacccaagaggtggaggttgcagtgacctgagatggcaccactgcactccagcctgggtgacagagtgagattctgtctcaataataataataataataatgtatgctacagcacaaagcatttatatcacactttctggtgtgcaaggtgctttctgcagagggtcccctcccagtccccctgtgactttctgctgaggaaaccaaggctctgagaaacacagctcagctcccatggctggaaggatgcagctcaggacttccctgactcccctcactccaggtccagtgctcacgggcagggctcagagtggctgttggaaggaggctctccttattgacggctcccaattcagagtgaggatttttttttctttgacattcttgtgttgggatcattttccctgttaccatcattggatgagtgtgaactcaggcagtggggggtgagggaggtgggaccagggagaatggcagcgttctttgttttttgtttttttttttttcttgagatggagtctcgctctgttgcccaggctggagtgcagtagcgtgatctcagctcactgcaacctctgcctcctgggttcatgcagttctcctgtctcagcctcccgagtagttgggactacaggtgcatgccaccatgcctggctaattttcatatttttagtagagacagggtttcaccatattggtcaggctggtctcaaactcctgaccttaagtgatccacccacctgggcctcccaaagtgctgggattataggcatgagccaccatgcctggccggcagtgttcttatgaacgtagagaacacctgcgcagatgggtcaggtgaccaggtcagagatctctgtcctgaagtaggaagccccctgtccttgtaggtgacagtggctgatacctagtaaagactcatcttggagtgaggtctgatggatgctagggtactggagggagaggagagagattgatgatggtctggttttatgttcacatactcctatcattcctttgggtttttcttatttttttgagatggtgtcttgctctgttacccaggctggagtgcagtgccacaatcatggctcactgtagcttgaactcctgggctcaagcaatcctcccatctgagcctccaaagtagctgggactgcaggcaagcaccaccatgcccagctaatttttttattttttgtagagatggggtcttgctgtgttgtccaggctggcgaactcctggcctcaagcaatcctcccacttaagcaatcttcccactttggcctcccaaagtgctgagattacagacatgagtcaccaccccatcgttcctttgttgcttcctgtcctacttactattgccttatcagtttatctgtctctgcccctgcccctgtccttagacagaggcatcctagcacaggtgcctcatggttttcccctctgggtgaccctggagcaagaccaacctcttaagaggggaggggagggaatgtgaataagtaaataaataagcagatgaatgagggactcttctcagcatctttggtgaccctgtctgactatcactggctgtagaatgtgtgacaactgagtctaccaggcaacggctgtttgccgggagcagcaggacccagccagaagacataatggaagcaggccctggccagagcagggacctcagagcctttcccggcagagggaacgcaatcaaagctggcgctgcttccgggaggagagaattcccaaaaggctctgtcagcccctctgatagggatctgcagggtgtgtgagagatttgtttttcagccaggatgtggggagttaaaaatagacaccctaatcccttgagttcgtgtcacacttgacgctgtgcagagccctatggctccattatctcacttgagtggctcggcagcctttgacgtggggagaggttgcactgcccgctttataaatgagcgtgtggaggtgcgtgcccaatttcttacttgagactgtaccccaaattcagtggcagaacctgtctgatcctcagcccctgaggtctgtgttttatattcttaggagaagccagatgagagtcaacaggctccaggagggaagcgggttggtggaaacaataggggtagatttttaagcaaagcagcaaggatggcagggagactgagaatgaattgaggtcccagggagcaaaggctcatgatgggcttggggagcagccgaggactgtaactggttggagcaggagttgggggggtaaggtagtgatgggaataaagcagaaaagtaccatcaggaccccaaatcgaggacctagaatgctatgataaggatagtgaacataaagctgtaggcaatagggagccattgaggattacagagcacagtagcttcctgctgtaacaaccatgcattgcaatgatgtgctaactggctttgctgtaggtattactttatggtgtttgacagaatatatattttttaaaccctcagaagacacctgtccatcctgacctctccttatggaaccttgcatcgtgctagggggagcaccccgttttctgctgcctcttggtttggggaggagccccctctggggcaaagtctgtaactaggtttctcggctttttctagtttttgtttgtttgtttgtttgtttgtttgtttttgagacagcgtctcgctctgtcgcccaggctagagtgcagtggcgcaatctcggctcactgcaacctctgcatcccaggttcaagcgattctcctgcctcagcctccctggtagctgggactacaggtgtgtgccatcacggccagctatttttttgtgtgtttttagtagagacggggttttgccatgttggccgggctggtcttgaactcccgacctcaggtgctccgtccgcctcgaactcccaaagtgctgtgattacaggtgtgaggcactgcgcccagccttctagtttttaatctaggtgctcctggttgtccatctgtctgtcttccccatggtgggaggaattaagtgacagggaggaggtagtggctgaagttctagcccgacctgactcattgaaacttttacaggctgtctagtgcatctgacaccctgccactgacaagctcccagaccaccaggatcagttttctccacttctcacttccatccctcccgctttgggacccccattcggctcccaacttctccaggcatcctgcactgattgttccagcaacactgaccttttctgtacattttagtgcccatggccctctaacttgtatgtttattaactctttgctccttccctagctaggccaaggcccctggtgggcaggacaggagctaagcaagatgtaagctggacagaccattggaaatcttctggtgcgatctatccattttagaattagggggatagaggcctgggtttgcctaaaacttcatgacaagttcctggcagagctgggattcaaacctggatctccagggctatcttggtccttggctgcaacatcacccacttctcagagccaccctgcttctcagctccaagagccaagaattcccagctctgcaagaatcccagttttgcagccttggctcctcctggggctgggagccagcaacgccaagcctgcaggttcccagagagggctcctggcgtcggtgtggcttagtcacagggatgagatcactactcacctctggataggggaggatgccaaggtttgggaactttcactctgagctacttgattttgtgtatgtgtgtgtgtgtgtgtgtgtgtataagaaaaacaaaccttttggttgggactttgtacttggctcatgaactgtgggcttggggaagctgctgagccatgataagcacttgtactgtgccatctcacagcttcccaggatagtggctctgtgttaggaaggagcttggaccagagccagaacctggtgttagcatttgctctgcctcacattggctgtgtgaccctgagtacggtgcatggcctctctgggctgtaatgataatacctagcagctcacactttctgagtacttcccatggaccagccactcggctcatcagcccatttagttctcacaatagacctgtgagatcctgttttcacctctgttttgcagatgaggaaactgagtcccagagaggaggagtgacttgcctaaggtcacccagctgggaagggcagagccagggttggaatgcaggtcttcccaactccaaagcctctcgtgtcaggcactctgctgccctgccctctagctgcagggctacctcctaagggattgtggaagtgtaagtatggagaaaccaggtgtaattcagcacgtgaggggtgggaaggtgatggatgaagggtctttttctacgctgatatcgttctccatctccccactgtccttgagtagtgctgtccttgaatagtcagaggggggcgcagaggagagcaggtacagcggtatgcaggctccatgagaggaagggcgtatttgaagatggtttcacggaccgccagtcctgggcccatctctttccaccccctgtaggtcactggctttgtgaatgttgattgtaattcctttcccatcctcccctagaaggtatcttcaaggcaggggctcgctaagggatttccttttgagtggagtgaccataagatttgtttgtttgtttgtttgtttttgagacagagtctcactccatcacccatgctggagtgagtggtgcaatcttggctcactgcaacctctgcttcctgggttcaagcaattctcctgcctgagccccctgagtagctgggattacaggtgcctgccaccacgcccggctaattgtaatttttagtagaaactagattttgccatgttggccaggctggtctcgaactcctgacttcaagtgatctggctgcctcagcctcccaaagtgttgggattacaggcatgagctgccatgcctggccttgaccataggttttgattcagatttggaacagaaatctgttgatggccactgaatcctgggcttggagtaggagctaggggaagcaccaagtaactcgttcccaccccaaggaagctgagtacagcagacaggctaagggtgtgtgtgtggtctaaggtccatcagacagacctggctttgggttctggctgctctacctaccagctgtttgaccttggacaaagttatcttatttctctgatcctcagtattcttaactataaattgcggataataatacctattttttagggctgttattatattattattattttttaattttttgagacagggtctcactttgttgcccaggctggagtgcagtggtgtgatttcggctcactgcaacctctgcctcctgggttcaagtgattctcctgcctcaacctcctgagtagctaggattataggtgtgtgccaccacagtcagctaatttttgtatttttagtagagacagggtttcaccatgtttgccagggtggtctcaaactcctggcctcaagtgatccacctgcctcggcctcccaaagtgctgggattacaggcatgagccactgtgcccagcctagattaaaattatacgtgcaaagaaagaacacagtacagtgtctgcacatcataaacatttaataaatgctgcagttttgttattacttattatttgcattattattactgatggtcttcttaatgcactttatagcagtcttgggatcctctggccatacccctttccagaacttactgcctttggtgaaggtagttctgggtaggggaagatctgaattaaagagtcaatctaccagcctgggaaacatagcaaaaccctgtctctacaaaaaaaaaaaaattacctggggctggtggtgtgtgcctgtagtcccagctactctggaggctgaggtgggaggatcgcttaagtccgggaggaggttgaggctgcagcgagccggagccgtgatcgtaccactgcactcccactttggtagcagagtgagaccctgcctcaaaaaaaaattattatttttaatgtgaatgatttttctcttggagatacacagggtctcaaattggccaaaaaaggtgtctgaacatgggtttttaagggagctgctttgatgaatagagaaaggggataatagagaaaaagatttctttaaggtgcttgaaatttatcttttgcatggtatccacagtccccgtgagcttgtttctgctgtgtaagtcaccggggtgagtgtctgttgaagcaggcatgcggggtaaaggtggggcagggcggaactccaacaagtctcagctgctgctcctccctctctcccttccgagaaccgccagggtcctccttagagagagagcctgctcagcctttggggaagccacaaattggtgaagttgctgtagacagcagtgtgtgtgtgtttgtgtgttgtgtgtacgtgttggtggggggaggtaagaggtcaagtgggtttcccagaggaagaaaggctagagccaggcccaggaggacaactgctcaggtttctgcaaacaggattgcaaaatcacttttcccgagcttacccagttctccatcggagtcttgcagccaggtcagctgggagcccccaagcttggcagttaggacacttggggaggtgtggggaggggggatgtcaaatcctgcctcagtttccccatttgtcctggctattcctagagccccatttatctaggctatgctttcggacaggaaacagagggatgtggaaggagaagatgcaggtttgggataagagttgagtctgtcacttcccactgtgtgccctcaggcaggtccttctgcagctgcctgggctcctcagtgttttgaggcttcggtgaggtaatgtgtgtaaagtgcttagcacagagctggcatgaagtagtgtctgtaattataaaccaccttggccactgttgtttttagcttgggacccaccttaccccgacctgactgcccttgcctcttgccttccctggagttcctgtttgttgttgacatcctcctcaccaactagtgcagggatttttaaagtatttatatccttgctggaatttctctttgcattgtttagttaattaccaaattgaattgcggcaaataatttcacttcctttccagtgctagggcaggaagtggcccggtgccttttttttactgtgattgagatgattattgagatatttgatgatgatgatgtctccttcccctgagaggttcgcttcctcttagatcagctccactggccccataaatcaaggcagcagccacgtgcttggaacataaatcttgtcgaggatgttgatgtgtttggccacatgtggtttttggtgtttgggcaacttctcgcaaactcgcggagggatagttgaaaaggctccctttaaatacagaacaaatgacctgtgcacttattggagaagtgctgggatagttgaaaagactccttttaaatattcagaacaaatgacctatgcacttgttggagaaattctgtccaatggcatacaaattaaaaatcaaggcacagggagaagtcttcagatggcaagaaatcagtggctcttctccgcagcttgatagtgttgatggtgttggcttctgccctgtccctcatggctctagggtggagaagcagattggataaagacatggggttgaaactgatgtgctggggggcttcagatccctgccctgccacttagtagctgcaggaattaactgcggccacttaattttcctgggttctaaaacaaaggatacaagataaccggcttcataggtctatgttgtaatagttttgcttcacacaatgcctggcacatggtaagcactggtaagtaagccattacttttaactcagggatcctcatcgtgttctttacccaaagacccttcccatcctacctttctagccttgacctccttcttgcaagatgataaccaggacctaatgtgtccaggactctcccacctttgcacttctttcttttctttttttttttttttttttttgagagggagtctcgctctgttgccgaggctggagtgcaatggcatggtttcggctcactgcaacctctgcctcctaggttcaagtgattctcctgcctcagcctcccaagtagctgggattacaggcatgtgccaccatgcctggctaatttttgtattttcagtagagacggggtttcactatgttggccatgctggtctcaaactcctgatctcatgatccacctgcctcagcctcccaaagtgctgggattacaggcgtgagccactgcgcccggccccacctctgcaattctgttgtgcggtttctactatttggaacatcccctatttggtctctgcccatagaatcctttctttttctttctttctttctttcttttttttttttttgagatggagtcttgctctattgtccaggctggagtgcagtgttgcgatcttggctcacagcaacctctgcctcccaggttcaagcgattctcctgcctcagccttctgagtagctgggactataggggtgcaccaccgcgttcggctactttttgtatttttagtagagacagggtttcgtcctgttggccaggctggtcttgaactcctgacctcaggtgatccacgagcctcggcctcccaaagtgctggtattacaggtgtgagccaccgtgctgggcctcttttcctttcagaagttatctcaagcactgtgccctccatgaaatttcctatggcccctcaaccttaactgccttagtgtatccttgttacgccttatgtctgcaatagttgtcggcccaagtatgttccatggaatggtaacctggtaagatgctttgtagaaaagaaggttaagaaaaggctgctgaatactttatgtacctgttttgtatagtaccaatccatatgaacaattttaaaggttctgagaaatcctgcagtaaagaaacctgctgagatttgtttactccagaactttccaaacctctgactgtagaacactttcttcttggaatgcctattgataagctttgcgacactcctggagaggtggcgttgtagacatctatataacagtttgatgctatctcctcttataatgaaggaaaccaaagcccagagaactcagtgactagcctcaggtaaatcccagtgtctaccactccatcacctcttgggtcaattggcaggtcctttataatgagtgtccaaggctgggtggcaaggaagggctggacatggtagccaaggacctgctttcaaataactttctttctttttttttttttttgagacagtctcactttgttgcccaggccagagtgcagtggcacaatctcagctcactgcaaccttggcctccctggttcaagcgattctcctgcctcagcctcccgagtagctgggattacaggtgcgcaccaccatgcccggctaattttatatttttagtagagacagggcctcaccatattgaccaggctggtctcgaactcctggtctcaagtgatccacctcccttggcctcccaaagtgctgggattacaggtgtgagccactgtgcccggcctcaaagatcttttggccttgtcgaggtggcgagatggacatatggaatagagacagattaactgctaatcttgtgtccctgggcccatgtgtaacaggagccttgggaccctgttgtgtccctgcccaagaagggacatgagagtcaaatgtcctttgagaacccagccctgtccctgggcctgggaccccaaaattcgaccccaccttcctcccaccctgatccctggggattcctgtggccctatgtggttgcctcctgcaggatgcaggcgagggaggggcgggaaggctgcagggaagagaagagccttctgtttattgaggcacagccttctcctgcctttctgggggaaaatgctctcttttagagtcctcttttttatctgaaattctctggggagcaattacctgacagtgggaattatctgctgtctttattctagtgcctgtctgcctgagttccttcttggagtaattgattttggtaattcagagcttctgaacgtttcttaggggaaggtgtgggtgcagaggcagggggatacccacataggcgtttttaaaggcgttggcggctagcggctctgctggtggtagttggtgacagggatggaacagtgactaaaaagaatgtattttttagctttgaatttttccccacttatacggaaggtgtgtgggttgcatgggagcgctcctgactgtggaactggggcgggtttgctgaagggaagtaaggagttgaaaggcaaattgtcaggtctgatgggcttgatcactcttcgccacaggcaggtcagtcctgagtaccggccctggcccgaccctggccctcaccatcaacctttggtctgccagggagcctgggaggtggcagaaactccttggagagcctttaaagagagcagcggctcccagttggcttgacctttctgctgggcagaccgaggtactggctccagaccctgctgccccaggcactgctgtcccctgggagaagagggctggccagggcacctggcttaatagggggacagagaaggtcatgaagggtggacctcagggtgaggggcctgggtgactggagaggtttatctgttccgtgaataaaaagggagtagggtggccaggcacgctggctcatgcctgtaatcccagcactctgggaggccgaggtgagcagatcacctgaggtcaggaggtcgagaccagcctggtgaaaccctatctctactaaaagtacaaaaattagccaggcatggtggcacgcgcctgtaatcccagctactcaggaagctgaggtgggagaatgcttgaacccaggaggtggaggttgcagtgagccgagattgggccactgcactccagcctgagcaacagagcaagactctgtctcaaaaacaaaacaaaacaaaagggtgaggggagtagcgagtaaatttgctcctagaaatgctcccctagctaattccccaatttcaaatgagtgaatactctggatatgggaggaagagcttggactagaagcttcctcaggctctctcatctcaagcgttctgtgggagggacagcccaatacagcggtttccgtggagtctctcttctctgcacctcacccaagggaaaggaacctgtggggcactggtttgggtccagccccagaggcagcctgtcctttgtcatagtgaccaccctccccgctgaggtctggacactgcagctccattccatggccttcggcctggtgttacttggcattttcattcctattttacagatgaggaaatcgaggcccagggtgattggttcacaccatgagttaacagtggggcaaggcctcatacccagtctcctgatagctggtccaggattcctgtgagcctgaatggggggtcaggagctcatcagatgcccagtggaagagcggggtgcgtactcacgtgggaggggagccggtttctctggttccattgtagctcttagctggattttcaactccatggctggttacttgagtctatgtttaatcacctgctagactgagaagcccctaaaggacagggaccttttgtcacattgggatcaccttttgtggccagctcagtgcttgcatgaggtcagccagggcgctttaggtacaagacagaaggcccccctcaagctggccagagtgaaagggattttatgggctcacctacctaaaaacccaaggaggcccaaatggattacgatgggattatctgtctgtctgtctctctcttcccatttccccccagttctgggttcagtttctccactgagctgggaatggggaaaggggagtccccaagggaaatgagggtgctggccccagaagaaggagggagcagacacaggcaaaaacaacaaaagcctcataaacatacaatgtgcatgtcatgaatggtaaattcaatggatttttttttttttgaggcagagtctcactctgttgtccaggctggagtgcagtggcacaacctcggctgactgcaacctcagcctcccaggtttaagcggttctcctgcctcagcctcctgagtagctgggactacaggcgcccaccacaatgcctagctaatttttgtatttttggtagagagagggtttcgccatgttggccaggctagtctcgaactcctgacctcaggtgagcctcccaaagtgctaggattacaggcatgagtcattgtgtccggccaaattcaatggatttttgtagaaacattttttttttctcccaaaaggaattcacgctgtaggcgtgacatccaggtgcacatcagctcctataactaaacagagcaagccctgtgcattgagaaagattctgaaaccacctcttggctcagcagaaaagagcatcataatcggtttaattatttgtgcctttgccttggtggtgggggtggcggggcaggggctgtgtgtacggcatccctaatctggtcccaattttggtgttgtagaagtacttttaagagttgaaaacaattggattgaacctaaatgatgttgcaagatttccccaaagcttaaagagccaattatgtggttgggagccctttctgaccggctgtgattccatcctaaggactgacagataaattattatgtggaggccgtgatgaagggtgattgttggaaggtgtggctcttggcactctgatggctccagggagagcttcgtgtcctttgtattgttttgtttttgttttgagacaagatctcactctgttgcccaggctggaatgcagtggcgtgatctcagctcactgcaacctctgtctcccaggttcaagcaattctcatgcctcagcctcctgagtagctgggactgcaggtacgcgccaccacatcccgctaatttttgtaatttttgtggagatggggttttaccatgttgcccaggctggtcttgaactcctggcctcaagtgatcctcccatctctgcctcccaaagtgctaggattacaggcgtgagccactgagcctggccttcatatcctttaactgtgacaagagtgagctgcatggcccctgcctgcgctaacggtgtcaacacatatttattcagtgcctaccatgtatcaggcacagttttggggcagattgagataaatttatcccggattatatgtcacacttctgaaagaggagatgttggaaaaggaggtagctcttaagattttttcctagttgggacttggtaagaattgcaaatgtccttacacttgggtggagtatgttgtgatcccagtaatgatttccgggagcgcttgtaaaccacctctggtgtctgaaattccaccattagtgattcattcctttggggtaagcattgccgtttctattaatagcttaggtattaggtactaatgggatactaaatagggatctcattcatcgctaaggcctccttaggtaggaagttattctttgttttttctcccatgacaaggccctaagaagagaacccctatttgggtggagttaaactgggatacaacattgggttggtggtggaagccagagtatgtgcattataagacgtggtgcctgccccacccagagtgctaaacttagcaacagtcaaaaattgtcatcatcaaatcacttttagtggtcattgttctccaagtttggatcctgaaggcagaacaagaactaaaggtccttcccggctctgaccccctgctgcagccttccggatccagccgctcaaatgggcggctccgactcctgctgcctgggccagctgctggaggaagttgctggagccctggccaggcacccctgccctcccacccttcccagctggaggtgtggctgtttgcttccacctgtttactttctggcttctagcagctccttccacactgaaaatgccagccactgaccggtccacaaacgccgaccatccccctgctccacttgcagtggttaaaggtgtgtgtgagctctggagtctgaatgggtttagaatgaggcttgacctgctgagtaactgagctgctctttgctgacattcccatctgtaaaatgggataacagtgctaaccccagtaggttcttggaagtatcagtgaggtagctaatacatatcaggtccctggttaaaggcctggcttataaaaggagctcaatatatgtaaactttgatattatgttattgcttggggccttggccagccaccctgggggggtcctgcccctccagctgccctctcttgccttcccagacactgtgctcttccggtggctcagatgtttctctattgagacttctctgttgacaccgcttgaccctctgaggtcctaacccgggtaccctcctcacctaccagctctcacctgggagccccacccatgcccagggcattaacaacccctgaacctgggctactcccaacacagactgtaaacctcccctgagctcagatggagagaagtgcttttcactggctgctctaaaagcacatcaaccaatccaacatgaaaggcccttcctttctcctaacaaccacttcctctctcgcattcacctgctcccccaggtcccaactttcctctttgaggggaagaccgcactggccagcccctgggacagggaaccacacccaggtgtttccttccttcccttccctttttcctacctgcaagtctggtggttccccttgggcaccatctcctgcaccccatccctgccctcactgcccattaggggacagcccagccacagccccttctggtgcagcttcctgttttctccatgctgcctccagggggagtccctggaccttggtctgaggggtccctcccttgctcaaggtataatcaagtccctgcttgagggactccctattttccctgagatataatccagacttctcagctcggttttcagggcccttcttccaaattccagtaggatcctccttgccaacagttccttcctatgtgctcaggagctcagctgactgaacaacccactccatggcctctacctgttagactgccttgcctgtgtttctcaaagttcccctgcctggtgtgccttcccctcagcccggtgcctgcctgtggatctgatcacattcacaaagcctgcaagggatgtaagtcctcgtgcagtccagtcccctgtctcccatcagaatatcatggctgtttgtatttctttttttccttttttttttttttttttgagaccagtctcattccgttacccaggctggagtgcaatgacacaatcttggctcactgcaacctccacctcccaggttcaagcatttttcaagcaattctcctgcctccgcctcccaagtaggtgggattataagagcatgccaccacacctggctaattttttttttttcgtatttttagtagacatggggtttcaccatattggccaggctggtctcgaactcctgacctcaagtgatctgcctgccttggcctcccaaagtgttgggattacagatgtgagccaccatgcctgaccctgtttgtgtttctttttcttttttctttcttttttttttttttttttttttgagatggagtctcgctctgtcgcccaggctggagtgcagtggcgcgatctcagctcactgcaacctctgcctcctgggctcaagcgattctcctgcctcagcctcctgagtagctgggactacaggcgtgtgccaccacgctcggctaattttttgtatttttagcagagatggagtttcaccgtgttggccacgatggtctcgatttcctgaccttgtgatctgcctgcctcggcctgccaaagctttgggattacaggcgtgagccaccgcacccggccccgtttgtgtttcttaccctccccttggctccttccatagaagcaatactttttgcagtctgggaatctctggggtctacaagagggggatcttgccttctaggaaaactgcctctcaggggcaagatggctgcctccagaagtgtgtgctttgaggaggccaggatggggacctccaatacctgacacagggcagaattctattccttgtgactcactgtctcgaaggttacgtgggttttgtcagatacgctgggctccatggccgggagccctccactgccctcgtgtcggggctctgctttcctgtctctctctcgggaggtaagatttccacttctcagggctggggctgccgggtggattgagcaatggtgtgggtgaaagcaaaacagaagtacacaaactaataattaacagatgtcaattgttaatagctgaaaaataccaccaccaccccaccccctgcccccaggagggaggagagcaaatggtcacttgatcccttggaggagattatttcacagccagcttggggcaggtttggccaagacagtgacaagtactgtggggtatatgggcaagggggatgggaatagtgccattgccagggccactgggctttgacttactttgattcccttgtttaatgctcacagccttaagagtcaagggcagaggcattcctgagaatgagcatgtgggtgcctgggggtgtgcacgtggggcaccctgggtcctatctgccgagtctgagccttgcgccatctctcttaagcaagtgagatgcttacttaagagagcaattttgctctctttctcacctcagttttgcagatgacattggcttgacatgcctgaggtcagccccagattgccaagccggggtcctcgctgtgacacggcatggccagtccctaccctagacccaggtggcagccccaccagatttaacatccaggggtggtgcagggccagtggggactttacctagcttgagaggcctcctctttgaggcagggcaaccccaagggtgggttttaagctttcaggtttaagagttcagttttgttgttgttgttgttcttttggtggggggaatagggtcttgcccttttgcccaggctggagtgcaatggtatgttcactgctcactgcagccttgacctcctgggttcaagtgatcctcccacctcagcctccagagtagctgggactacaagcatgcaccaccacacctgactaattttggtattttttgtagagatgggggtctggctatgttgcccaggctggtcttgaactgctgggcctcaagcggtccacccacctggcctctcaaagtgctgggattacaagcatgaaccaccatgcctggccagggttaaggttgttttgttttgttttgttttgtttttgagatggagtcttgctctattgcccaggttggagtgcagtggtgtgatctcagctcattgccacctccgcctcctgggtccaagtgattctcctgtctcagcatccttagtagctgggattacaggcacatgccaccatgcctggctaatttttgtatttttagtagagatggggttttgccatattgaccaggcgggttaaggttttgagtttacttcacatctgtaagctgcttctctccttcctttgcctccatgtttgtacattttctaatgagagaaaccatccatttgttctctcacctgccttgggcccagcccagttggttctgtctggaccgcagttcccacccctcagccccaagacttggaggtaccttagattcactcctctcctagtgccaccatctcactacctacctgtgcacctgttggccctggctcaggtgtcaccttctccatgaagcagcttttccaggcagagtctatggttgtctgtgccacggacccagcggggctgcccagaggcaggagctggtgttgttcctggtgtccccaggactgaccaggttaacacctggcagcttgtaggagtcacagaggttcgtggcaaggaggaaggcatgcacctgaggagcagggtggagtggtggctgagattgctgaaatagcctacggccaaatccagaccatgccacttacaaaccagccttggacaagtcagatcacttctctgaggctcagtttgctcatctgtaagatggggaggtaaaaatacagtcatgtgccacataatgatatttcggtcaaggacagaccaataaggtccttaagatttaacaccatatttttactgtatttttctgtgtttacatacatgaatatttacaattgtattgcaattgcctacagtattcagtacagtaacatgctgtacaggcttgtatcctgggagcagcaggctacccaccatctagcctaggcgtgcagtaggctacaccatctaggtttgtgcaagtgtactctatgatgttcacacaacaacaaaatcgcctaatgatgcatttctcaggacatatctccatcattatgtaacacacaactgtacctaccttctggaattactgagaaagttaaaagacaggaacgtacatgaagcatttaacacagtgccaggaacgtaagtctcaataagtattcatttctgttgtggggatttagggggctgcgagaagagcacgctgctataaacaggccttcctgggccgggatctcggaggctaagcactcgcactgcctgccccgtccagggcatggatgaggggctgagatggggagggaggggccctgctttggcagtcagcccctctgtgacgtgtccacataacatccataggaagttattgtttttccccatattttacagaggaggaagtagaggctcagagagagaggctcagagaggtgaagtcattcacccctgtcacacagctgggagctgcagtgccaacatagatgctaccaaagtggctgggctttttttttttttttttgagacagagtcactcttgtcgcccaggctggagtgcagtggtgtgatcttggctcactgaagcctctgcctcctgggtttaagcgattcttgcgcctcagcccccgagtagctgagactacaggtgcgcaccatcatacctggtgaactctttttttttttaaattttaatttttacctttttagtagagacaggattttgctatgttagccaggctggtctcaaacttcggacctcaggtgatctgcctgccccggcctcccagagtgctgggattataggcgtgagccaccacgcctggccaatggctgggctttgaatctccctttggcagtgaggtttgggttgcagtgagtaggttttggagtttgggctgatgggatggcaggatcaggagggctttctgctttttttttttttttcccaatgatgccagttctgaactgttgcttcctggggcaccacaggcagggagtctgggccagtctggccttcagccctatttgctgtgacctgtatggtgtgtgtttattttaatatgtgatctagttgtctccattgaacgatcaggattttacatccaaatctggtagcttcttgtaaacttgatcttccggccatcgtgggcccacattccaataggacagtgtgggctggagtgtgttccccatttagcctgcctggccaagcctgcttctctcctttcctttccctcctggctcacattggcatttgcgtttgtgattcctgagccaagtgggctacagggctggggcacacgtggggtatgggccctgggagccccctctgaggagctccctactaagaagggcaggcagaattatgattcaaggcaagatgagtggccccagagagatgtctagacagtgcttggggctttcagaaatgttaatgtgttcagaggagggcatccagtgacttggcacacgtttaatgagctcttgccttgtgcctggcactgggcatccctggaggctgcagagatatattcaggacacagactgtcctcagagagcctgtgtttccgggggtgagggcatccaaaatgggctttcatggagcaggatatttgtgttggtaaaaatgaagatgtgaggcactctgggcagacgagatagtgtagaccaaacttcagacgagaaacctttttttttttttttttgagatggagttttgctctattgaccaggctggagttcagtggtgcgatcttggctcactgcaacctccacctcccgggttcaagtgattctcttgcctcagcctcccgagtagctgggattacaggcatctgccaccatgcccagctaatttttatagttttagtagagacagggtttcaccatgttggctaggctggtctcaaactcctgatctcaggtgatccgcctgcctcagcctcccaaagtgctgggattacaggtgtgagccaccgcgcccagccagaagagaaaccttgacagcaccccctggtttgagctttcggagagtggctcttgctcaagaatgacgaaggcacaggaagattcaacctggagaagcactgactttggaggaaaaggttctcttgtgttttgaatttctaaagacttttaatctattttttaaaaaatagcctttattttttagatcagttttaggttcacagcaaaattgagcagaaagtacgagatcccatctactctctgtgctcacacaagcacagcctcccccaccatcaacatcctgcaccaaaatctgcttcttagtctataaaaatggcatgtcatgattttgtttattaaaaataaaatcaaatattatagactgaaaactaagccttttttcttcacccctactcaacacacacacacacacacactcacacacacacacacacacacacacacaagcatatgtaagaatctatccacccaggagatcatcccacatatcctgaagtatccgatgcatcttcacctcgaagtccacggtgtcggtatacacatttccacctcgcgctgcagaacggtcacacaggattccattttcaggagagactataatttattcaaccaggccccctgtgatggacacagacgttgtttacagttttggtgctttttttttttttgtatgctgcttcaaaccggagtgcataaacatccttgtacatctgttcttacacgcttgtgagagtttatctgaaggatagcatgtagaaggagaatctatgaatttaaaatggacgtttatggatttttaacttttgatccatgttgcctactcactctctgcaaagactgtggctgtgtactctcctggcagcaggatgtgagagtcggtgggtcatgatcttcctgtgtatgaagagcggggctgggctagggctggggcagagttggggtgggcccctggcagcagagtctagccaatgcgtgggaggcatttggagggcatttttctcagtgctgccttgcactttcatgcacatgtatatatccatagaataatatgattctgtttaaatttcttttttaaagtcatgtatcgttctgcaacttgcttctttcgttcagtaagatatttggacacatttttctagttcagctgtagaattccacctcactgtttctatctgctgcgtagaactttctgcagtgtgagattgacttagccacccctccgtgggggttctgcttcagggaacatcctttgtgggtctcgtcaggcttgggtgccagcatccctctgtctgcaggaagcacatttattaggaaagtggtcattgctaagaacgacactgctgttattcctgccatgcacctggagcagaggttgtggttcttgccttggccttgggcttgggcctggcacttctctgagttttctcaagctccatgtgggtgcagtgaatctgctgactttgttcctggagctgagtggagatgctggctcagggcttctcctagctcagagagtggctgtgatgtgattcctagccccccttagtcatcctagcagactggattaggtgggccccccccatcctagtgatcctgaggcagatgcccccctgcccaggtgtgaacagactctgcctctgggtggaagattggcacaagccatgggatcacccatttatcttctagcgagatcttcctccaggtttaaaagagaccctgtagggcacctggtcctggctatgggtgtggtggttggaggtgataaggaaagaacttaggggctgctggtggccactgctgacagcttctgctaagggtgggaggcactggaagacttttgaatctgcagagtgtgggcaatcagggaaggcttcccggaagaggtgggactgggcccagtgggagttttagaatgaagaggcagtgtctctgggctccaaggcatcccctcggcaggggcaggggagggaaagcggggcatgcagagggcctggcaaaccttctttagagaggctctttggctacctgtggttgcaggatgaccacttgatgtccagaaagctactaaaggggagatttggaactggacagactgggctcaaaccctgactctgttgttaccagctgtgccagtcacttaccctctctgagcctcagttacctggtctgtaaaatgtgatgataacagttccttcttcacagggcaagtgggacggtggcttgagctcctgtttggagaactgttggcaccgacctgcaaaaggtgacaggtgtggtcacacctgaaggtaacccaatcacttgcgcctggagtgatggctagagttggccatggtgtctgggtgaggccagagacacttgcctagtagaaccccccagactcagtgatggacccaaggtgctggtgaaggcgacagaaatgatgcgatagattccctttcgctcttgggtcccaccccaggggcccacctcggggccctacctgcaaaaagcagtccctcagggacattggacaggtgaagaggctttgagggcatgacccaagttggaaggcgccctggagtacctggggagaaggaaagcctggccggctgatggcagagggtggtgggggtgacagccaagcttcaggcttggtgcttctctcagaaaatgccaccatagatgatgtccccaagcagcattgggtgtgtcctcatggcgccctttcttcctgggtaattaatggtgctctcatccccctgagagggtggtggtgggtatggcgggctggccgggcaggcgccgggcagacagtcagagcccactccagtcctcctcatccatttattacctgtcagctttgctctttctgaacataaaataagtgcctgggaggcggccagggcccctgaagccccgagctgggctgtctggggcactctggctccagggagtcattccctggaggcttctgctaagctcaccccactgaggggcttcagataagctgggacaaccaggctgtgggcacaggctgggttcctctgtgatgtgactgaggcaggtgggtggagatgcaggactggagaaggtcagggcctcggcagccagctagaggccagaatttgggttctgagacaaatcctcctcttttccctcaaacccccgcctctcagccagggcttcttaaccagggcttccgggacccagtgagtctcaggatggactccagagtgtccaagaactggaataggaaaaaaagaatcccactgttattttcaagaaccattaattagaattacaaatggtaattcctgcaattataaatgtagatgatcaaccacagtggcattagccattctatgatgttgcagaaatcataggaattgcagaaattctcatgtcctattattgtggacctgataataggacatgagatacccagttgtcatgggtatcctaaaataacatttttgttcaccgtacttcaaaattacaatagttattagccccagatcttgttctctaaggcattaataaagaagcacatatattgctatagcattaaaaatatttcgggaggtggaggcaggcagatcacaaggtcaggagtttgagaccagcatggccaacatggtgaaaccctgtctctactaaaaacacaaaaaattagccaggcatggtggcaggtgcctgtaagcccagctacttgggaggctgaggcaggagaattgcttgagcctgggaggtagaggttgtagtgagccaagactgtgccactgcactccagcctggtcaacagagcaagactccatctcataaaaaaattttttttttttttgataaccaggcatgcgccaccacacccggctaatttttgtatttttatttattaatttttaatttttatatatatttttgaatggagtcttgctctgttgcccaggctggagtgcagtgatgcaatcttggctcactgcaacctccgcctcccgggttcaagcaattctcctgcctcagcctcccgagtcgctgggattacaggtgtgcaccactacacccagctaattttggtatttttagtagagacagggtttcaccatgttggccaggctggtctcgaactcctgacattgggcaatccactcggcttggcctcccaaagtgctgggattacaggcatgagccaccatgcccggcctgttttatgtatttaaaaacatttttctgagagggggtccttagaccttactagagcccaaagggcccatggcatctaagaaaggtaaagggctcctgctgaggcccagggaggggccctcacaggctgggggctaccccatgctgacagggatgaggtgtctgactgtcaaatggactgaagtctgcactgggcaaggctgctctttgtacccatctctgtgctggcctttgggggacagcagctcctggtgagagaggaccttgcctcaaggagctcctggcctggttgcgggagggggcaaggcacacagacagctgaacagctccctgcactgtcaggagttcagaggaggagagagaagtcacttccaccactgggacctgattgaccatcctgggaaggcttcatggaggaggtggcattggatttgggccttgaaaattttgacgtaagagacaggggaaagcaggtcaggctgagagggaccagactaagcaaagaaatggagtccagaaggctggggcatgagtggtgcccagggaggagcagggttcaactggagggtacgggagagagcagagggaggtgggaatggaagtcctgaatgcaaggcaaagaagcttgcggcccgacgcggtggctcacacctgtaatcccagaactctgggaggccgaggctggcggataacaaggtcaagagatcgagaccatcctggcccaaatggtgaaaccccgtctctactaaaaatacaacaattagctgggcgtggtggcatgtgcctgtagccccagctacttgggaggctgagacaggagaatcgcttgaacccgggaggtggaggttgcagtgagctgagattgtgccactgcactccagcctggctacagggcaagactccgtctaaaaaaaaaaaaaaaaaaaaaaaaaagaagcttgcactctgctgttggcccagggaaccgtggcagggctttcagcagggagcagggcaggtttgggtttgaggacagaccccctggttggtgtgtggagagacgatgggagaggatgggcgggaggctgggtggccatcgttgacaccttgcagtcatctgatggggaatgtggagagctgaactgagcccagggtcctcgtggggagagacaggggccgtcccagccatggaatgaggtggaaggtcaggaggctcagacctctggggctgggactgaccgcctgggtttgaattgtggcctctgcgggttactagctgcgtggcctcgggcgtgtttgttacgcttgcgaattaatttgctcatctaagacgcacggtgatagcagcacctgtctcgcagagttgctgtgggcgtaaaatgtgacaagggatttaaagctcagcacagttcctggcacagagtaagctctggacacgccatagctctggttgtttattaccggtgataaaacagatgggtcctggtgacccagtggactggaggagatgcagggacaaacgcggccaagtctgaagtttcagatcaggaccaaagcccgggtctctgcagctggtatctgagcacagaccaggtctccaggtgctctcttccctgctgaccctaagggctggggccaggacaccccctcccctgccctcacctcctctgcccagctttcccttagcaaggcctcctctggcccctccagcatagactcccaccccccaggaagggtcaaacacaaactccatctcattccaacacctggtgccgtctaaccccgttcttttcctccaggagttcccagggtcgggaaggtgcagtgaatgagacaggcctcagagagtgacactgggagctccacttgggtttctaagtctcagagcaggaagtgtctagaccagcgtcccactgtgagtgagcgctggagcctccctgaagaggaatgcggtgggcaaggtggtgtgacaaaggtggggtctttgaacgtgggattttgcaggagcagcttcacctctgggcctgctcacactggggctgatacttggggtcctggaattccatatgcactttcccctagaccctttcggggggctccccaaccctgctcagcttccctctctcccagactgaggggttccagctgctccgggcagtgggagcccactgatgccggagaataaatttgctgttttgtagagcatgtggatgcatatttggggggcttaatcttcttaataaattgttctcaaattgtgcactattaaactcctgaaaaattcatgagcacgctgggaatagagacctcatcgggaaggtttgacatgaacaatacaataaacgcagcttctaaattgggtcagggaagccttcgaggcccagagagaggacattcccgcttgaccctccccaggcctataaattaatcatgtgcacaaagagggccttgttctctcttgtcagagccaggggttgtgtctttgcccactgaccccaccccccctaccaaaccacctctgctgcaaacagagtgcctggtgaggccgttcagcgtctgtgctttgttattcctgtgtctccaaagcaaggtgggtgtacgtttcagcaagagagatgtaggttagataggaggaagaacttcctggctgactgtggggtggtgtgaaatcctggaatgggctgctctgggaactcgaggagactcttttcattaggcttttaagacctggcaggctctatcccccttggtgctctcagaccattgcccagagacagcagtgaccaggacagacattgccccagggtttggccacaggagctggcctggatgtgcctcattctggaccgttgtgggagatttaaggctcagctaaggggacatcaggacagcatcctccaggcccaaaccctcaccatagtctaagtacatggcatttggataagggaagtcaagttaggtctctgccatgggtctggggctgctgctctcttcctcaacaccctcagcctcttggagtcctattcaaaggcttggcccagatgccacctcctctgtgaagcctttcttgatttctccctgccctgtcagtcaaaattagttacttcctcccttgtggtccctctgccttgggcccttgttcgagactctctgtggaagcctatgtgtcccaccagactgtcagctctctgaggacagggactgtgtcagagccctctcaggacacaaagggacacagttcttgaagggtcctccagagaccatgccatgacttgcattggttttcacatgccaactcctaggaagggtcccctatgcaccccggggtaggagctgaatggcctggcttcccaatgacaacatgggaatcctgtgcttttaagacaggagtagggccagaaagaggagagatggaggaggcagaggccccggccggccacacttgaccccgcctttactctcttagttctgacatttcacaagcctttgtttttttctgaatctgctcaaagtccttcaaccctgcaggtctttggaggagggtgaaatggccacccttagtgtacacaggagccccaccctgagccactgtggccccaggtgtccccttgtgcctagaaagcagcctcactccagcacaagcctgggcaggtgcagcctcggtgcgcagtttggaaggggtgacgcgcaggtctgagaatgggtgggcagtgggggtggagttcactgtcagcgccaaagaggaagtggggaggccctcgtgggagtgtggaagaggagcacctttctctggggagagcacttccgggagatgtaactgggtagcctacccagacccctggccctggtggtctagcctctaaaggaagcagatgatagcaataggagaaggcagtggacagccccattggtcctgcccccaccccagccaccacctgtggctaggctgggaggaagctgctcttccactcccaccctcaccccgtgggctcggctgctccctgctgacttgcacctcagaggcacccccagccccctcagccagaacagccaacaccaggcaggtttgatgcctgataccatggggccctgtgtgccagtgcggcccacccagcctcagacctgtgtatatgtgtgtgtgtgtgcgcgtgcgtgtgtatgtgtgtgtgcatgtgcgtgtatgtctatgtgcgaaggggaagcttggcagagggtggctatggagtggagggggctggagaggccaggcctccgtgtggccggtcaatgcctcaggaggtcagcaggtggagaaagagagccgtgtgtggggtcaaggagaccctggggctgttcattggacagcactaattcaatgcctaaaaataacctcggacctggtagggcacttcagaaatttccaggctctttcagaccccccacaaactcatttcagtctccaacatcttgtgaggaagttaattccatccttattttaccaccaggagcaccaagttctagagtaaatctgtgaagggctcacagttagttggtggtagagctgaaactggaactctggtctctctggccataggttcagggccacctcctgtggacctactgtgtgcttagccccgtgcagggcctgggcatggaaacggagtgaaggaggcactggctttgctgccaacatggcctgtctgcagggaagaaggccacctgagagagaggttaggaagcaccagggcaaccacaggaaggaggggcgctgagatgggagcgaggccttggacaagaaaggatatccagagctagagagggtggggcttgagggtggaggccattcaaacacaaagcactctgggtgaagacaagacagtggggagcgggttttggcccagccccacgcagagccttaaagacgcagccatgggcatcccctgcagggcctggcaggcagtctgcccaggagagtcacatttgtgggaccctgctgcagaggaccttcccaagggacagtcccctgtttagatgtcttttttgggggggggtctgggggatggagtcttgctctgtctccccaggctggagtgcagtggcacgatctcggctcactgcaacctctgcctcccaggttcaagtgattctcgtgtctcagcctcttgagtagctgggactacaggtacatgccaccatgcccagctaattttttgtatttttttttagtagagatgggttttgccatgttgcccaggctggtttcgagttcctgagctcaggcaaaccacctgcctcggcctcccaaagtgctaggattacaggcgtgagccacggtgcccagcctcagatgtcttttgggggtggaaccagggctgcactgcagaggtcacccccctacccctggccctgtcactctccatcctcttcctcctggccagacctcctgctctggcctgcttttattctccttttagcataagatggcaaagtgactgagaagaaggaaacaatcaaaggaagagaagtggttgccacggaaactataaagtggaagcagaaactttcaggagcaggagggaggagggaagcagacctggtggctgggtgggaggagaggcgggaggcctggcctgggctagcctggagtgcccctacgcccagttctcgctgctctccccagctgagcaacgctgggatctgtgctctcgggagcaggagggccgtctggtttctcccaagtctgggcaggaggtggctggtacgagagtgaggtaagcagcttggcctgtgggtgcatggggctgaggaggagccctgtcttctgcccagatccccacattgttctgaaccgccagtcccatgtcagcctggaggagtctttgcatgtctttacaccacgtcttgattcctccgttctaacaagccaaaatgacacggtgcaggactgggcagtttaccaggcagcttcctgagtgcagtctcattcaagtcttgtgacagttctgggaggatagtattcagattctacagagtggggagtttgggcccagagaggttagggaacttgccctaggtcacagagctgagaacccccaggggtaggatttatcccctggactgtcagatcctaaagccttgagctctcttttccttctggacactttgttttgtaatgcagggctctgcatgaagccatgagttctctgtagcctccagccccttctcatccttcattccagtaagactttcccccagggagctgctatttgcttcctggaggagcctagggaaatttagtgtctctgaggcttgatttccccatctgcaaaatgggcataatagcaccttttccctctgaaggcttttgtgaggatgcaatgagacaattcaagtcaagcactgggtgcagtgcctggcacagaggatacccttgaactctctgctggctgagcctagcaagcacccgtggagtgggcagggctggggcaacctccctatatttcagagaagccacttcgtccgtgaaacggttccgatgggttcctgccttgctcggggaattggaaaggtagattgagatcatggctgtggagccttgaaaccactgagtctggtgggggaagaagcagggtctcccctgctgtaaaactggccactagagctccagtggacattgagacgtctcagccaatggtctctctgttggaggaagggaggggagagggattgggaccctgcccagttagcccctgagtaggaggctcagacctgctgaaggtttgggtctgaaatgaccccttggaattccgcgttgcctgcccccgaattgcagccaagctttagatttctcccgggagaggcccagccagtcaaatgtattattaaatggcagagaggccgagcgctgcatgtgaaagataatgggggaatttatatgatgggctataaatcacagaatgagaagccctgcaacctgtggggaggaaaattaagaagtcctgagcagtgacttgtttggggtgggggcggaaggcatttggccctgttttgctgtgagcctggcaggttcatgatgcacgaggcccaggggtccgaggggctctgatgtgcacacttcctatgtactcaatggtgacacccccctccccccattggcagctgctgtgtgacaatgccaagctgggcactgggttatgacctcagggagagcagtgtgccaggagagacagatgtgagatgaatcatcaaaaaatatgcagtcggccctccgaatctatgggttctgcatctgtggattcaaccaaccaaggattgaagatagaaaaaaattgcatctgtactgaacatgtacagactttttcttgtcatcattacctaaacaatacaactatctccatagcatttacattgtattagctataagtattctagagatgatttaaagtatacaggagggtatgcatatgctatattttaatgtcagggacttgagcgtgcttggattttggtatctgattggattttggtatcctggatccaatacccctgggataccgagagacgcctgtatggcactgcacaaagcagtgggctccctggaggaaaggcgcagggagctcagagagagtgttgcaggagggctgtggaggaggcggtgaattgagagaggggagtggtggtttttctggaaaggaagagtgaatgcgagtcagccaggtggctcaagagagctgtggcagggaaggtgagccagaaagagtggccaaaggccagcagggccagggcagctagggcaggggctgtgtttcagatttcactctggctgttttatggagaaccacactgaggaggcagcggaggatttggggggacagttcggggggatggaggtccccaaaggtagagatggcgatgccctggttctgggagatgtcaatgaaggtgatgaggtggacagcctcaagctggaatttggagctctgaagagcccatttcacagagcaggctccaagtctacaaagccagccccatgtcctgtatcctaggaggtgggaatcatgggagcaaagacacaaaggaaagaagcagtgaagggctgggggccagggtggttggggaagggataggagtagggtgtggtaagagggaagataggagtagggctggggccatatccactgaccactatcctaggctaggactagagtcaaggctgtgtgggattgaatcctgtctctgccactaatcaactcttgtgcctgtaaaatgggagagtaacaggattcactgcttttggtcattagaaggacttgctgaattgacactgcctgacaaaggggaagcactgaattgggattaagtatgcactgagtggccttgggcaactctgccctctctgagctttgctttcttctagcaggtctctgcaaaccctctaggccaaagtcctctaatctccctgtgctagcagtgtgcagctcccgagggtggtcagagcacagcggcaagctggctgtattgcctcagatgggaccgtgtccctctctgccctgtaaggggataccatgcctatcagagctgtaaggggatattttaatcagcccaggacctgctgaggtcagagggcatagggaccagaacaaagaatgccagtcacggctgctgcctggccctagatgacctgctgggccccagaatccagaccacatggggagcctgcggagggaggtggaagctgggggcctcactgtgggtcaggcactgttcaaactgggtgttctccattttgggcctcagtttgcccatctgtaccatgaggtttataacccctccctgcctgcagcacatggggtgctgaaaaaaaggaacaggctgcagtttggacaaagcagattcaggtctttattgggggctgtggtctcaaagcctgagagagagcaacaggtgggcgagtgaggctcagtgcggcccacggatgacctgctttggaatcacctgtgggaccactgcccgctgatgaaaaatgcagactcctgggctgttccccagactggctaacttagactctgcccggtgggcccaagtgtctgcactttaacccacatcccaggggactggaatgtctcgaagtccaagatctgaagttctgggcatccccttccttgcatcaggggaacaggggcccagagggcatggggtcggctggcccaagttgcttaggagactggaatcctatgccatgccactcaggggtccttcctgtgcatcgccccaggagccctgggagtcctgggtgatgcctggggcaaggggtactttatcctagggctccatagcccagcagggggcagcgcagatcagcacctgctgagggctccccgctgctgtgtgggcctgggctgggtagtgcggatctagaaagagctcactgttccggagaggtaggtgtgggcctgggtgggaagacgggcctgtgtgtgcatgggagcctgtgtcaggggggcgacaatgagagagagagcaccaggaggacacaagaaatgcgacatcagagaaagcaggcccagaacattgtgaaacttccttacagcttcccgggacagaggctgcaggggaagaggagagggcatctgttgcccaagctgcctccctaggactgtcagtgggattggggtgacttcaggcctccccacctccccccacaccatgtcctctgggcttttaaatgaggatcaatcagaggtcagcccctccccaagttcagcatcagagtcaggagggactaggggctgggctacaggctaaactccagccccaactctccaactggcccttccttactttgcctgctacagcttcctctgctgctgggaacctgtgggcaggcctacggcgtggggtggggccagtcctgagcctctggacctctgacttgagagtgggctgaccactagatctcttgaggccttctgcagttcccagttgtgggaaggcagcttcactttcatactttctcagggcaatggggggctggtttggtagtgagctccctgtcaccaaaggtatgctagacaagactaggtgaatttttcttcctcttaagcctttggtgacaggctaaagggtgggtcctgggccatcccctctttataccccatctgtctgttaatcattaattgccaagagagctcctcctgggatggggtgactccttggctatgggggatgctgatatccaggatgaccttgaacttgtttttcttggccccaaactttctgctacttcctgtttgagcaggtgcagaaattataggggcccaacccttccttgttttcctggtagaatttccagacaaaatgctcttcccaggatgggggcagagctgggattgttctcactcccaaggggatttgaggaatgaggatggcagaagctccatttaattcccacctacctggtcttaggatgctagctatgggctaggtgggatcctcaggaaaggccagtaaatgtgagaaccgtggctctggcagtgcttgcctctcctctaacaccagctatggctcccatttatgttccagattggacacagaggctctgagtgtcaatacccaatggccttgaacacccacccaggccaaccccattttgtaggaggggaggctggggctgtgagccagaggagccttgttcaaaggcacacagcaaagtgaaggcatttattcatccattcattcattcaccgagtgcaatctctgtgccagttccttcacggtcaggatttgcaccctggcctgctgaccatcctcagctgccactcaaaaataaactttccagcctgccatccatgtgtcacaccaggcctcaagaggtaggtcacttgttcctggtcccacagccagcctgcctgcctgcctgcctgcctgcctgcctaccttccttctttccttcttccttcctctttctttcttttctttctttctttttctttctttcttttctttctttctttctgtccatttctttccctttctttctttctttctttctttctttctttctttctttctttctctctttctttcctttctttctttctctctctctctttctttctttctttctttcctttctctctctctctctctctctctctctctctctctctttctttctttctttctttctttctttctttctttctttctttctttctttctcactttctttttttttgacagggtcttcctctgttgcccaggctggagtagagtgacacgatcatagctcactgtagcctcaacctccctggctcaagcaatcctctcacctcatcctcccaagtagctgggactacaggcacacaccaccatgcctggctaattattattattgagactgagtctcactctgtcgcccaggctggagtgcagtcgtgcaatctcagctcactgcaacctctgcctcccgggctcaagcaattctcgtgtgtcggcttccagatgggatttcaccattgctggccaggctggtctcaaactcctgatctcaggtgatccacccacctcagcctcccaaagtgctgcaattacaggcgtgagccaccacacctggcttttttttctttttttttttttttttgtagagacagggtctcactgtgttgccagggctggtctcaaactcctgggctcaagtgatcttcctctcttggccttccaaagtgctggaaccacagcttcttttctattaaaaaaaaaaaaaaaaaaaagaacaggggctttgagcccagctcccttcatgcacctcgttcatcacacatttattgagtgctattctatgcactgggcatatggctgtgaactggactcacaaggttcctgtcctcattaaagtctggggaaacaaattaatgaacatctgaatacacagattagatagtttcaggaagcgctatgtggaagaaaataaaacagggcaatgggatatcatggagagattggggcaaaggcacttgagataaggggtccagggaaggtctctgagggtgtgatatttgagctgaggcctgaatgacaggaaggagctgtccatctgaagatctggggtttgtgggaatgaggcagcaggaactggagatgcaaacgccctgaggtgggaccacgtttggcacattcagagattgaaaagttatcaagctgagtccagaactatcttagccagtggctcctcaagaaagccactagaaagctcttttaagaatatagattccttggccctacccatcaaaatctggattcagggatgctgggagtggggccctggaatctgtttctgaatgctcccaatgtagttaatggcatccagtccagccccacacctgtaagcctgccatatggagccatccccttctttcattttttgcagagggaggatcagagaggcaccgtgacttattcaaggttgcacagccacacagtgacaaatctaagcctcaagcccagatctcccaccagagttctgcccttaccacttctcttcttcccctctggagaagctgcctgggcctcaccccaacttggttctatctccctgtctattctccctgatctcacccctcacatagcctgctccccagtcctcactgtatcctctgctccagcctcaccatcctacccactgtctccagtacatgctttgttcatttccacctctggggcttttctcatgctgtctctccctccaagaatatacttttctgctcgctatgcagtcaactcctactcagccgtctagctccatgccagtgtctcctcctccaggcagtcttccaggacttctctcttctccaaattctctcagtgctgactccaggtcagataggctcagccacttttttcgaatgttgccatcatctctcccactgttgctaagagcctgctctgggctgggagctgtactgatcagctctggactgtcctctcaaccaatccacaaattagtgagaaaagaaatagccaaggctaggcatggtggctcaaacctataatcccagtgctttgggacaataaggtgggagaatcacttaaggccaggagttcgagaccagtctgagcatcatggcaagactgtgtctctaccaaaaagttaaaaaattagccaggcatggtggcacacacgcctgtagtcctagctgctcgggaggctgaggcaggagggtcacatgagcccaggcattcgaggtcgcagtgagctataatcccaccactgcatttcagcctgggcaacagagcgagaccttgtctaaaaaagaagaagaagaggaggaggaagaagaggaagaagaggaagaggaaggggaaggggaagaggaaggaaacaaggaaggaaggagaaaggagggaaggaaggaaagagaaagaaggaaagaaagaaaagaaaggaaagaaaggctgggcgcagtggctcatgcctgtaatcccagcacttggggaggctgaggcaggtggatcacctgaggtcaggcgttcgagaccagcctggccaacatggcgaaaccccgtctctactaaaaatacaaaaattagccaggcgtggtgacacacgcctgtaatcccagttactcaagaggctgaggcaggagaattgtttgaacctgggaggcggaggttgcagtgagctgagatcgagccattgcacttcagcctgggcttgctgagactccatctcaaaaaaaaataaaaaataaaaaaagagagagagagaaagagagaaaagaaaagaaaaagaaaagagccaggaggggaagctgcttgtcagtttatacgcaaggctttgatccactatgttatttgactcttccacaacctcacaaaatattcatatacccctttataccttaggaaatggaggcacagagaggtgaggcagtgatctggggtcacacagtgaagaggggaaggctcatcactccaaatcccccacctgaatgggggcttcctaggagctgactacagggcccgttcagctgtcctcctctgtggtctctgcaggagttgagcaaggccctcccctggaacccaggccagtgccagccatgaaatggttcacagatgaccaggcaggcctgcttgagaagggagggggctccctgacctcacactgggaccatatgccaccccctctggtttcccagtgggtgcggagctgtctgggcccttactgaagggggaggaagaagcccagagacctggaacctcagccccaggcctgggccagggagaaaggaggggctgtgggcgtcactggggcccagggcccacctggagcttggcagcgtttctgggtcagggcagggagaggaagtacacagagagagtggctccaggcttggccatctgggctgaaatgccggctgctagggttggggtgaggaaggagggctggggctggggcctggagagtggattagtctcccctgggccacaggattggagccctcaacttcagggcagccagtatggaggggaagcccagggctcctgtgggcagaaggcagcaggcattctgggagaggtggtccaggctctcgacggagagaggtggtcttggcggctgtatttgggttccaaggtggaacccaccctaatccccagccccatgtgaccttgggtgagtcgctccctcccttggtctcacttccccatcttcaggaagggatgctgccccaccctgactgctctgtgctgggatgagagagccaaccagaccctcagtgattgcagagttgatgccagatcccagtttgccatgggttagggagggtcctctgggtaagcagctgattttgagggcctcagcttcccccgttcatcagtttctctcaaggttccttctacctcggacattccggggctttatgacaggctgtcgacgtgtacgagggagacgtgcatgtcctcttctctgggcttctggaggactggaggggacctgtaggtggccctttggggaatggggagatttttagatcctgatggaatctctgggaggtgagctgaacagagctgtctcatctccatttaacacgtggaaacctgagacccagaggtatcacacggtgaccccctcttagagttccggcctgtcccgagggctctgccctcggcccagccctgggtgacttgattggaaaaacactcacactccccgaggctctgtctctgtgtgttcaaatgtccacgcttgactggtcccccacttccgcctgtgttgagaggggcagagccatccaagcctggggtcatcttgtccctgactgcaccgttttctgcaaacgatgtcattaaatatatcggtggcttttgggaggaagtctggggggcggtggcagtggtggtcgcctggctagcctggagtgctttagtgtgacctcttggggcttgtctatgcttttccctgaatggggtgacctggccccagcctcccccatcttcctagtgaagatcctgctcctggtccagccttattcccggatgaacagtggatgcaggaagtcgtcattgcctgccagacaggccacctcctggggcagaggccatgaccttaaccacaagtgtcccgccaccccccccaccccgaccctctgtcccccccacccccacccctgcccagagctccagagactgaaaggttgagactgtcctgggaggcggatgtgtgcaggcctgcctggctggggacttccccggtcaccaccacccaccctcatcccaacaggaaacctgacaggtctgagccttccagacacccattgtgtggggcctagtgtgggctccgatgcttcccctgtcaggactcctgtcgcccctagcctcctcctgtcccttgacaaagctggctattaaagaaagttctagactgtttccactcccccgtctctgcattccgtactgctcaaccttatgatcgttgctcctttcagccccctgggttcaaatcctgcctcctagtgcaagccctgtgactttagggaactcacctaccctctctctgcctcttgacatttcttctggaaaaagaaataaccatctgcctcctaggattattctgaaattaaatgagatgatgtgggtagaatgctgagaacaggatctgggacagtgcatgctagatgcagttcagctaccatgattaggattaaacccaaactccaccctcaaacaaacctcttgaggtcaaacttgtaaccctcctctgttaagaagccttgggtttctgtggtgccccacgcatgagcatctccccttccctgggggaggctggtgtttgaagataactggttgtggttgctgttatcatcccccctgtacagaatggcccatcaatgaaggctgtgctcttctgttttgtgcttagctgcagaaatgggtgatctgtcttaagattggaggaaacactatgctttatgggcaatttaaggcttttcaaaggtaattttggcaatatgcttttttttctctcttttctcactgacttcaaccctgacaccgcagagggactcaagactgccttgggctagcctccctcccctgcatctggtgcccctgctgacccaccctggcctggcccatgatgtacctggactttcagcccagctctgatgctacccactgcttcttttccagcagggatgctgatggttttctgcctagaggggaattttttgggtccatccctccctggtcttcacaagtagcctcctgtgtccccattattcaaactgactagtggggtataccaggagccaggaggggggtgtctctccttggagtcagagtagacttttttaaggagggggtgcttcaatttgcaattgcaaaaatgtatatatacacacacatatatatacataaacacacatatatacgtatatatacccatatatacacatatatatacatacatatacatatatattatatatatacatacatatacgtattatatatatatacgggtatatatgtatatatatgatggaatactactccgccatacaaaggaatgaattaatggcattcccagaaacctggatgggaattggagaatattattctaagtgaagtaactcaggaaaggaaaaccaaacatcatatattctcactcataagtgggagctaagctatgaggatgcaaaggcagaaaaatgacacaatggactttggggactcagggaacgggtggaaagggggtgaaggataaaagactacaaattgggtttagtgtatcccaagttactgctcgggatatgggtgcaccaaaatctcacaaatcaccactgaagaacttactcatgtaaccaaatgccaactgttccccaaaaacctatggaaataaaaaatttaaaaaataaaaaactgaggggatgcttgagctgggtcctgaagggtaagcaggaatgcaccaggtgggtgcagagggaagaccttggtggcagcggtccaggtcccaccaacagggcgaagactggtggtgggaaagagtgtctggaggatgaccaagggggctgaaatgggttggggtgcaagcgggaggtggtcgctttttgacacagcttggtctctgagagttcgccttgggaggcttttgaggggagggtaaaggtgctggtggtggggttaggtcagatctgatttagccagtcctagtacccacacccctacttactaaacttgcatgtttccaggccccatccagacccactgaattgagcgtcttgagggaaactcagaaatatgcctgttcactgagtgaaggtgatttgggggctgcagccctgtccccgctaaagcagcacatgggagaggtgggagctgggcctattcaggagcccctctggaggtgggagaataagaccagacctttagccctgtaggtactgaggctctcatgttggcagggctggaaagtccgatctgttggtctgtcacaggaagcagtggtagcaatggtggtggtgggcactggaagcagggcttctcctgttcagagagagaaagccacaggggcgccggcgggaggtgggagcagatggggggccagtttcccagcaggattgattccaggtcccctgctgggctgtacagggagcggcctttaactgccctgttcctgggccaggaagaaggaaaaggagcctgggctctttctctcctagctcctgccctgcccccttcccactcagtacccggagagtacctgccccaggcccgtggagatgctcggctcagctggttggcgatgcccattcccatcccaagggtagaaatgcacaagcttcctccatttcactagctgaccctccttcctccacaaggcagatggattgggggtccatacgttctccctataggtagggaaactaaggcacagagaaggacttgaaaagctgaagtggggagaccatgccagacctttggagcccagctgtgcttacagatgaggtcctgagttccaagttactgccccctctcccctccacacacactcctcagacttcctgttgggggcccaggctaagaccacttgcccacaccactgataacagtgagttgattgtgagcctcccgtcccctccagggagggctggaacctggctgatcagagggttcctgctttgggaaacaaaatgggccagatgaactcaggccctgggagcaggaccgttgcccccgtcctgagtaggacttcctgggagtccctcacccccagaacccgtggacctggctacggaggttagtcatgcctggaagtgccaagatgtggacaggtggtgctcagaaccccacctacgtgaggaggcactgaactgggttctggcagtttggccagaggaggatgcatgctaacaaggcccccagcttgcctggggactgagtgactgtgtgtgcgctctgtccaggggcttctttttagagacgttcctgcaccatgtctgctgttgaaaggagatagggcaatgcctccaagcttgtctgacctgcagcctaccggctgcatgtggcccaggatggctttgaatgctgcccaacacaaattcataaactttcttaaagcatgatgaggtttttttgtgtgtgtggtttttttgtttgtttgtttgttttagctcatcagctatggttagtgtgagtatattttatgtgtggcctgacaattcttcttcttccagtgtggcccagggaagccaaaagattgggcacccctggcctaacccaaaggaggctaagggtgtcctcttgggcaccctggttttccatcttcctgtgggattggccagtattcagggaagaggggaccagggcagctgatagctctggactcctcagactgagtttgctggagtaacacccctcctgcccctcccccctggtcagggaaggcgcctggcttccagctgtgagacaggctccgcaggactagggaccctccccgctggctgagagcgctagggagggggcttcccctgtgaggtgcaaaacccggcctggatttctgcccagacggccccgcccactccagggccccaccttccccactgttctggaggaagatcccctagccggcctcaggcacttgcggtgactcacaccccccacccctaagtctgaatgttgagagccccaggctaagaccacttgcctctgccactttccatgtgactgaggcaagacctccttgccaaggcctcagtttccccctctgtacttcaaaggaggcagctcaggcaggtgtcttaataatttaaacgacgaatattgctaaagagataaggggcggggagagagagagatcactgtgggccatggttagggaagggtggaggagctgggtcctgaaagggtggactttggtcgggtggagaaaatagccaagaaggcagtccctgctggcagcacagcaaagagaagtgagaattagggggagcagaggtgaggctggaggggactttggttggggcaagattatttggggtccaaataacaaggatgtttagacgtattgccattgtgctctggggagccacggaaagctcttgagctgaggagtgacttggagaaagtttttcagccaatgcaatagagggagttggtacctttccttctgccaccctgagtttctggtgcctacggtagggtagggattgttctgccctgccttcagtgctttgagtgcttgaaacagacaccgtaattttaattacataaaaatgatacgtgtatcagacgggacaacctttaaaacgtaaagaagaggcaagtatcctgcatcacaggggagtctttcaacctggctgggccagggcctgcggagcagtgagggtcgtttctcagcccagcgagcctggggcaggaacggaccctaattgaaggtgaccgtccccaagcatgcgtcctaccccgggctccggagagcgcacaagcaggtgtgcaccgtctacccgcgctggcgggattgggtgcctggtgcgccctcaggtcgacggtcgaaccctcgggggcgggggtgggagccagaaccctcgggacgacccgtctggggtcccggggaaactccgggccgcctcgccccgccgattccaggccgggatttctcccgcactgactttccgggccggtgccagcccggcctccgggtccccagcccccgccgcggggccggctgctcggggagcgggagggggcaggaggcggaggaggagtttgagcgactttgtggggcagccagggcctcggcggccgctcgggcgagcgcgggagaacgcgtgggcgcccgccgggctgtccggagcggccgatggggcccgtgtgagcgcgcccaggcccggcccggtgcccggcgggcggcagcatgtccgcgggcggcagcgccaggaagagcaccgggaggtcctcctactactaccggctgctgaggcggccccggctgcagcgacagaggagccgctcccgcagccggacccggcctgccaggggtaggcgccaccccgacccctgacccctagaccctcctaaggccactaagccacctgatgccctgggatgctagggaccgggatcctccttccagccatttgccgggggtttcctcatccgccccttcctgagtctgccggaccccccattcccccagcttctgcttagtcctcctctcgccgggggaagccgaggctctagggtctcctcttaagccagggacagggagaggggagcctggaatctttctccgcatctcagatcagacctcctaccccactgtgcctcagtttactcagcagccgggcaataaagtaacccagggtggatctgagctttcccacaccttgccttcccagcccaggccgcggacttctttcttccctttccaggaacttaacgggctccccacctcttgggtgctaggacaagtgggtggacctcagggaaggaaccgtgacccctcgagcgggtgggcgccagctcctttgcaaagtttctctccatcaagctcaggaggcaggacgagacggagggggaggtgcgagcagcattttctttttccagtaacaggatcctcggctggaaatgcgtgtgatcccgggggctgcgtttgggcgggtggtggccgggacttccttccctggctgagtaggagggagggaagcccctgggaggaggaggccttcaaaggggctctggggaggctggagtcctaggcagaggttcaggcccaccgagggtgcccgtggggtggaagggaggagaaagacggcgccttagcagggacctgggccgagttgacaccatcaggttatcttgaaagtgggaagccgggccctgtgccaacaaatgccatgcagggaatctggtagaccaagaggggccacattcccaccctgcaggctgccgttgtgtgacctgggctgagctgcctctgaacttcagttttcttgtcggtgtgagggtaaatgaagcaggcaggtagtgttcggttgcttccaccagaatggggaagacttttcccacagtcaggtctgagtagcactgtgcagtccagggcttcctcaggaagtagtgagttccctgtgcacagaagggttcaagctgaggctaagtgtgtgcacaggtgtgtgctggtagttcagtcctcaagggtctctcaaagcctgcaatccccccactcctgcctttcctgaagtcttagtaagtacagaattaacagtactaagttacttagtaagtacagaattaacagtactaagcctttagtactccttggagggagtactaagcctttagtactccttggagggagtactaagcctttagtactccttggagggagtactaagcctttagtactccttggagggagtactaaagacctggggaaggctttatctcagtggttcaggttttggttcttctatctctgtccttctatttaattctgtacttgctaagacctggagaaaggcttagtactgttaattctgtacttactcccttcccctggacttggtctgggagaccgggaatctgggctcaagctttgtgactttgggcaagtcatttcccctttctgagcttagttttcctggttgtaaaatggacctgccgtatgtggaggattcagtgaagaaactgagaaatgggagctttgaaaatgcccagtactgttcagaccaccctggggcctctccttctgcacccacctcacgtcacctcacccacccgcccctcctttgcctcagaaatgccctgtgtgaccttttcctcttctcacctcagcccagttccatccctgactgtaatgggagtctcgctcctgttcagctgacctcctgctcagctgaccaggcaggggataatcaatgtgtcaggggctgtcacctgagccccagctcccagaccccacatacacaggatcactgcttgtgtcccagcttgaaggagctcacggcctgcagagcggggaggagactgtctctgaacagaagttatatctggggagatcagggagagcttcacagaggaggtgacatttggatgggatctcacaaaatggatagggtttcccttcgcagagggagtaattgagtcagatctgggttcaagtctcagctgtgcacacaactattctacagccagttacctctccaagcctcagtgaccttgtgtggtcaatggggctagcagtgacagggtcatgtgagggccagaagccagtgcctgggactaaggctgcagctgagggtgagctactgtcttctctctggacagaatgaacagactgcgcagtcagggagaaggaaaacggcttgggtattgagaatagagttcctcctgggtttggggaggggagtggattgggaagggggctgggtgagtgggtggggaagagcaggcaacagtagtttggatttgataaagggccttgaactttgggaggccaaggcaggaggaatccttgagcccaggagttcaagaccagcctgggcaacatagcaagaccctgtctcaatattgtttttgtttgtttgtttgtttgtttttttaaaaaaagaaggcctggagtgatgaggagttagttacagctgcagccagggtgtagggtggaggctggaggcaccctgtcctcctcctccttggtgggaggcagctagggcagccattgccctccctccactaaagcctcagacgcctgactctaccccagagccacaaccaccacctgagggcagggccccacccagggagaaactcaggctgaggaagccaccctgtggcctttgagccagtcccttctgaccttgaacttcagcctccccatccacatgggggcttggtcccatggtgtggtagcatcggacctcagaggagtgggtggtgcctagcatctcagcctggatcagactcttgcccccacaccctttctggcctctggcactagcagggaaggaaaatgaccaagaactcaggctgtgtatttgttcagaaacagaaaaatgcaaggaagagttggttgctgccaggttctgcaggtggccaggctgggggaagggagcagggctttgtccctggtagggctgtgagtgagggacagtatctgcagtctccctagtttgaccaataagggacttaggttcttcccttttctgggcttcagtttccccatctgaaggatgggcagagtgagacctgctgtggtggggggtagagcacgaagctggagggtagctggaggtggggtagaaacagtgaccttcggagggtgagggccatttgcattttcccactgtgtccctaactccacttgaaggctgggcatgtcccatggatttggggggatcctttccccagaagggtatcatcagcaaggtgcctccccacctagtcacaccaaaatcaagaaaagttttgtctctgacccctgtgtttccccagggctgctaggagaaacagaaattttcctctagccctggataaagttctgacccattcattcagccagtcagctcctcttaagcacctactatgtgctgggcttcagcttgggtgcaggggcacatggagatgaatcacatgtgctcccagcccttgccaagcccccagtctgttggggaggccagcttgttggggtgcactagggcacaagtctctttctaggggacagagcagtggttagtgggaggcaggggctgtagttccagctcagccgcggactggttgcatgactgggcacatcatagggcctcagtttccccatctgtcgaggggggttaatcttgctctcctgcctcttggaatgcctatacccatagccatgaggggttttgattatgttgttcatgttttcatctgagtttttctaggggtccagccacctgccaggccctggctgggagctgggggttttgcagatgtttttctcttgagatggtcaggtcctcctccgtgcctgtacacacccctcttgcatgcctctgtatcttgcccgcgtggtgggagaggatggtttcatacaactggttcctaaccaagagaacagttaggtaaggacctgtgtgccaccatggggggtgggtaacttctcaggggaccctggctttttttttttttgagacggagttttgcttttgttacccaggctggagtgcaatggcgcgatctcagctcaccgcaacctctgcctcccgggttcaagcgattctcctgcctcagcctcccgagtagctgggattacaggcatgcaccaccacacccggctaattttgtattttcagtagagacggggtttctccatgttggtcaggctggtctcgaactcccagcctcaggtgatacacccgcctcggcctcccaaagtgctgggattacaggcatgagccaccgtgcctggctgggaccctggctttgataaggtctgcaagaggcctctggggcaacagcttggacttcatgagttgggcgagcctgagaacagccctgaggtgggggggttttgtggttccccagttttcaaatgttccctgcaagggccctaggcctggctctctgcctccaccttggatgacacctgtgaaatcattatgcccttttctgccttgtctcttcttctgtttctgccaagacacaatctttcatttggggcttggccctagcctttccagtccctcctctcccttacatacctcaaggattggggagctcactccctctcaggttgtgtaatgagggtgaaaatggctcctttttgttacggctcctgtgtgctgcgtgcctgctccatgcctggcaatgagctcaactctgaacttgccttgtcttatgcagtgttcagaacaacactgtgagatggatactgatactatcctcatttcataggtgaggagactgtagcccagagaatgaaagctttgcccaaagccacacagctcagaaatggtggagcccagctctgcccacctccaggtcctgagattcaccttgcgatatccgtgggcaggcagacctttctaaggtcaggccctggctttgagaaggccacctcccttcacagccaatgacttcactgggtgttcatggcaattgtctctcacagtcttggtcaaagcttgggagggaggcaggggagtggccccgttggcatctggttgcctcctccacctgcctgggatagctcaggtgggacctccccggcctgcccctgccccctggatcctgctgtcattcatgacctgccaaccatgccctttcccagggcatgcgacaggtctcagggcctcagccatgtttctccaccaaagcccttagtgctgagggttcagagtcccctggtgtgaggtccctggagcctggcagacacctgaggcctaatccccagagctctctaggtcctcgaaggaggccacaggccccagtgaatctgctggaatgtcagcctcttgcccttgcctttgtccttcctgacccaccctcatcatctttaataatcaggaagagaacagctccctttcaccaagctgaatgtgtgcccggccccatgccaagagctccccctgattacctcatgtctcatctcagttctccaatcctcctagcaggtaggggttattgttgtcactttcctttaccaggtgggaaacggagctctgggtgtgatatttcctctgcattttcctgtcggggtggtgaaataactggtttgaacccagtccactggactcgaaagctcatgctcagaagccccagggctccctctaactttcttggttgctgcaactcagagagcgctggaatggacccagggcatgctcctcatctcagcggttcaggttttcattcttctatctccatccttctatttaattctgtacttactaagacctgggggtacagggaggggcttggagcctatttgcccagctgctgaatggggaggttggagagatggatacttatggctccagtaccaggagccaactgtttcccttgacaactggggaaactgaggcccacagagccaaggccacttgcccgtggttacctaaagatgttaacgagaaatccgggtctggaactcagatccctttgtatcctgtttcggtgttggtgtagtttgttgctttccctaagatgagcccagatagggaaactgaagtgcctgggctcctggttgggtcttctgcggggagagaatggcgattcaactcccgtgtactgttgaacttgacacaaacacgctcacatcccaggctgcatacgtgttttgctttagaaatgacatgaagccttttgactatttttaagagaaaggcaatggctgtgatatttcccctgcacctccctctcggggccacttggttaaatgtcaggaaagggagagtatttcctggtcaggaacattcagagcttgctgggagctgaagttttgttttccattaagtaggtattcggggagtctatttccctctgcctcctctgtttccctggaagcttgcgcttgacagttgcagggaggaggggtttgagaatgagcagccgagatgcccacgtatcgcgtgcccgctctaggagtggcggggtggctatttttagccatcccgattcagtagaggcatttcagcgtttgttcaatatttaattatccatctgaaattggcccatgtggccttcagtttggaagcagctctctgtgctgtgatttcccagttgcataaataaggaagcaagggaatctcaatagccctccaaataataataacgagaaaaaaaagtagactcgatactcagcaaagacaggcttggttcctcggtctagacagaccacctgtatgttagcagagaagcaccaccgaggacgcccatcacgcccttggaaatgcggcggtgctcagtctccgaatctcagatccacaactgcctgggttttattggggatgggttttcctcccttcgccaggttcctgtgttgactttgacagctgctgggtacctgagaggtggtttggggattttgcttttggaagccttgttagcttttatttccctcttctcttctccctgacagacaggagagtactatcggcatctgggctgtgctatttctttttccttggcctttggaggcgatgtgccgacatagttgtgaaatgaaaaaaggcagagcacagggagggagatgttggggccatgaggctctgccttccttccccaagcccctggctgatgagggagagaggggagaagaggagagagtggggcccaagggtgctgggcagtcggagatgactccttcctactgtcctgcttggcatggagatttgtggactttgggttcggagactggaaaccaataaattggtaatctggaataagcttggtttttctatccatttacacctctattctggggacacagagtttggcctaggagcgtgtacagagtcctgactaggtcataaatgctgtgtgactgcagacaagtcactgaacatctctgggctcagaagcacatgtaacagatagatatgatgcagcatagggtgtcattataggccaggagaattgtcattattagctgttcacccaaagtctgaggggttgcttgcaaatcagttagggctgatctagaaagaaaacgtttgggaggccgaggtgggcggatcacgaggtcaggagatcgagaccatcctggctaacacggtgaaaccccgtctctactaaaaatacaaaaaaattagccgggcgtggtggcaggctcctgtagtcccagctacttgggaggctgaggcaggagaatggcatgaacccgggaggctgagcttgcagtgagccgagatcgcgccactgcactccagcctgggtgacagagcgagattccgtctcaaaaaaagaaaaaagaaaagaaaaagaaagaaaacgtgatgccagtggggactggacccacctaggtggtttctcggcatccctaccctgagaggctgccacaggtctcactggtacttgttcagagcagcagagctttagcgagccacctagtatgtgtgacctgggtgccaggggctgccacagcagatatagccagcccccgccctcgggagctcagaggccaaggggaagagtcttggcataaggttagcagatggtgtgactggaaaggtaggcagggccttgagtggtgagcaaagaggggagaacagcccctggcagaccactgggaatcaaaggaaggattttgaaaataacaggaatgataacagtgatctccatgtcttgagcacttacacagcaccaggggttcttctaagtcctttacatgcatcctgccttaaatcatcattctcccaggtggtgttatcagctccactttctagatgagaaaactgaggctcagactggttaagtgacttgctgagcatcacccagctactgagtggcagagtccaggatgtttaaccctcactatacttaccagagctgtgatttaggaaaagaactcttaacaaccctcaagctagactggtatggtgcagggagaagaaagtgggaagagggagcagggaggccagtccgcttcctggggaattttgaaggaggccggcaggtgcaggatgggggaaggcagagggcaggtggagaggagctgggaagtttggaagggctgacacaggagagaggatgccgccatctgagggccagtgctgggctcctgccacgatctctccctggcctgcggtgaaatgaggactgtaagggcattgcagcgagtttcccataacatccatttcacttcagtaacccattttgatgcctcttttttattctgagatgatggtctttggattctttggggttagaacattccttttatgcaatacataaatgtctagtatgcaccatactaaatggtgttcttttttttaaacatctatatttggcaagaaaagaagtcagtggttctgtgtggcccaccctcatattatgctacttcatagttttcatttatagacattgaactagttcctggaattctcacaggatggtaggctgacacccacgaaggagaagtccaggggtcgtccttacagcgagaggagtgggagctggtggtgggataaggtggtgggataaggcccttggaaaggcgtgaagaagcgggaggatgagggtcattgagggctggggtgggggatgcccggcaggctgtggacatggctgatgggcctgccttggatgctgatgctgcaggggttttggcacaagactgggcaaggggcttttcagggagcagcttcaggagaaggcgagaaaggtgctggagcctgcaggggatcgattatttgggggagaggaggtgtggggtgcagaataggacaggattggagaagtttggtgaaaatgggggtgcaagagaagcttggatttcccattaactgtcaatacagtcatggttccacctggtatctagaaacctgttcacaattgtaggtttagcagcacacagggtggggtaagtgtctctccccatcaggagcagcctctgaactctcctgggaccctgagcttcagggaacccaggctgtggcccccctcccccactttggcaatgctgtctgcagagggaagggccggttttactagcacagggagtgctccggctcctgtgtgtcggggaaattctggaagaggctctcttccagaagttatggaaggtccccgggagacagaccaccagtttgggccaaacccctccatctacatgaaacaacaacaacaacaataataatgtttacggccaggcaccatggtttatgcctgtaatcccaacactttgggaggccaaggcgggaggatcacttgaggccagaagcttgagaccagcctgggcaaatagtgagaccccatctctacagaaaattttaaaattttttgttgtggtggcacaggcctgtggtgttaactgtttaaaaggttgagggtggaggattgcctgggccaaggacttccaggttgtgatgacctatgatcgcaccactgcactccgccctgggcaacagagtaagaccctgtctcgaaaaaaaaaaacaaaaaaacccaactcctaagattacaaaaagcagtaaatatctattacagaacagaagaaaataaaaatcacctttaatccagcacccaccaataagctctgggatcactggggggttatttccagcccttccccttcttttctttaagtttttgaaaattctaaaatattctaaagtagaacagaaaagcatagaaaataatattgcagacacccacctctcaggttgaacaaaccttaacattgccatacctgcctctcttctcttttctttctatctttcttagaaatagaaatgattcaggtccagaaggagtcaggacagtgtggtctactggccaaacccagcccctcatctgtttctgtatgacttgtgagccaagaatagtttttacatttttaaagggttggaacaaaaagtcagaagaaggagaacatagggagttatatgaaattcaaatttcaatgcccataaataaagttttattggaacacagccatgttcattcatttgtgtattgtctatagctgctttcacgctacaatggcagagttgaatagctgagacagagaccatatggacttgtaagcctgaaatatttgctatctggccttttatggaaagtttgctgacgcccaagatacagctaaagccacctactctctctccaggcataactggccacctaaaggtggtgggtatcctgcctacatgtgctttctgcttttacatagaagcctatgcttccaagtgtgtcgaattgcattgtgtgtttaaaaatggatatggtgaaattgcacatggcagagaggagcaaacacatatggacaccctgagacctccttagtttcctgaactccagcagcacagagtaaatgccagctctctgccagccctggaatgggccctgcagatgcagagaaaagaatcgtgggaagaaaactccagaagaaaaaatggggaaagtgacactgccgactcaaattactagaaatcctcagaaagtaaaaaaggaaaaagaaactcagggttgagagaagactttgggccggtgaattcatccttggagtgttcaggaaatccagagatttttggaaggctgggaattctttggaagtgaggcgtgtctggagataaggaataggaagcatgggctgtcaaaagcaattgttagggagctcaagtagagaagcaaaaggaaaacctggggacaaggtcgacagatgctgaaaaccttgtaggatttatactaggctacaccagactattaacgcggccaaccagagaccaacaagggagcaaacccttgcactgtccttgcggaagggccctacccagcatcctgggatgtaactgggaaggatgtgtctcattagcacctctgccccacctctggaataccagctccaagccaaacacgtcccctctgagcagctgctgtgccctgcccccgagtgctctatgttgaggatcctccgggcaggaatggtgggctggatgctgagccctctacagttgtccccatgtccctctcccaccagactccactccccagcagcagtgggcaacctcctctgattctgaaccacctcctgagcttacagaccattggaactcgatcccagttccctttaggagacagcaggctatcatagttccatggcctcaggacactgtacctgtaccacctccaaactcaacatcataaaaccaaaacgtgaaatcaacatccctcatctctttctgccaggtagctgggactgagctgggccctggggacatagagagaggccaagggccaggcgcgaactcagcttcctgagtcacttgggagcactgtcttctcactcatctctgcacagtgccattcctttcccacattggggcaacccttagattcagagatatccgggcttgaatcctgttttcaacgtttcctagctgtgtggtcatggtttgaacttcagtttcctccgattaaaggtggagctgatgtttcttaattcaggagtcgattttaggataaaaatacaaatacgtggcacagtcattatctctcttagatctgtttctccacatttcctggtgatccatttttattacatagagacaactagttgttttttagaactatttgttgaaaaacatatcttttccagcatcaatttacctcggcactgtttttgaaaatcaattgcccatgtatgtatgggtctatttctagactctattctgttccattgatctgtatgtctatccttatgctaatactacactgttttgtaaattagctatgtttcaagatcaaagtacttcttgagaccaggtaatgtaagtcccccaacctgtttcttctttctcaactttgtttggctgtctaggtcctttggtttgccatctaaatttaaaattcatcttgtcagtgtcctcaaaatttttattttggattttgattgggattacgttgactctatggatcagtttggggagaaatgtcaactaagcaatactgagttttccaagccttgaatgtagtatatctctttatttagatccttaatgtctctcagcagagtttctgagttattagtctcttatgtgttaaatttattaagtatattttggtgctcttggctaatcactgaagtggctgagattttactttacttgcagctaacaagttaaacaagtagtttcatgagtgctggcggaagacacgagacccctgggtcagagacaaaggactctatgatccatggcgtagcagatggaataagcttcaggtttatatcagttccccttcccgctaacttcctagtgctattgtagaacataaaatcatctatgctagaacataaaatcatgatctattctagaacataaaatgatcttctttgtagctttcccaaattataacctcatgtcccctacaggatcttatatacagtctgagtcaactgttctagaggctaaaaattacacaaaggactgaaattcagttttgctttagtatcaaatcattaaattagaactttggagataagttaaaatttgacttccaagttgtcaaatacagaaaggtaaagaaagtttcaaaatgatatggaaaagccagtatgtacacacttaaaaccttatgcctgtttatatttgttagaaaaaataagcctgttatttcatatagccatgttgttctaatttaataatatagatttcaaataaacatgggttggacatggtggctcatgcttgtaatcccagcactttggaaggccaaggctggaaggaggattgctggaggccaggagtcggagaccaccctggccaacatagtgagaccccgtctctaatgaaaataaataaagaaaagaacaaaagtgcagaacattactaaggtggaaatttggggggaaaatagtttacagttaatgaatgaaatgaaaaataagatgaattaaataatacatgtggatatttaggttttgataatcatggttccctctggagtgctataattagaatttatataccctaaagaagtattactgatgtacttagtacctatactaaaggtaaaatacacagagtgtggagtgactgtatgaaaggataacatgtgtacagatgtgaaaacatctccaagctatattatgaaagaagcaaccaaggtatcctatatttttgtggttttcaagctctatcgcatatgtcttttgataaaaggtgcattatggagaaagagcaaagcttaccttatatgggaataagtgtggtatttctaaaaggaagctcttctcttttattaagccatttgtagatttgaaagaggagagatgggagcccttgaaattccatagtcctgaatcagacgatgatctgaacctgtatctctctatctttactttaatgtaactagaatatgttgagcctggatccatggatgtattagtgcctgtggctgctgtaacaaattaccacaaacttgtaactcaaagcaacagaaagttattgtcttacagttctgggggacagaagtctgaaatcattttcgctgggctaaaatcaaggtgtcagcagggctgtattccttcttgaggctctggagaagaatccatttccttgcttttgccagcttctggaagttgcctggttccttgtctcatagccccatgtcactcccacctctgcttccatcatcgcattgctttctctgacctgcctatctccttcttgtaaagacccttgtgattattttaggcccacccaggtaatccaagataatctcctcatctcgacatccttaaattaatcacatctgcaaagtcccttttgccatagaaggtgacatatcacaggttctagggattaggacgcatggttccttggggaacattattgtgcgtagcacaggtgggtaaggtttagtaacctccaagcaacacctctcctccctgtcccagagaggcgtgcctaaaggctgagctagaaaaagtgtgcagtggtatgttctcaatcataagtgagagttgaacaatgagaacatgtggacacagggaggggaagatcacagggaggggaagatcacacgccggggcctgtcggcgggttggggggccaggggagggagagcatgaggacaaatacctaatgcatgtggggcttaaaacctagacgacaggttgatgggtgcagcaaaccaccatgtcacatgtatacctatgtaacaaacctgcacgttctgcacatgtatcccagaactaaaagtaaaattaaaaagaaaaagtgtgcagtgggagccaggagagctgccaatttatcaatgcattattttagcaaactctttatttggcttcatcccctatccccagccccaacacacacacacacacacacacacacacacacacacacacacacacacaacactcttaaatagacgtacacagaggcataagctggacagctcttcgtctggaaagttctaacaatctgaagattccatgacttgttgcatggtgtgttttgtttgttttcgagacagagtcttgctctgtcacccaggctggagtgcagtggtgccatcttggctcactgcaacctctgcctcccgggttcaagcaattttcctgcctcagcctcctgagtagctgggattacaggtgtgcaccaccacgcctgactaactttttgtctttttagtagagaccaggttttgccatgttggccaggctggtctcgaacccctgacctcaaatgatccacccaccttggcctcccaaagtgctggggaaaagcactttggggtaaattacaggcgtgagccaccacgcctggcctgcatggtgttttttacctttggcttcctgctcagttcacctggcccctccctcggggagcactagccagttcactttccacgtgggagctatgtttccccacccacaggtatgttcctgattcctgatctttggacttctctgatccactttttctttctttctttttcttttttttagacagagtttcactcttgttgcccaggctggagagcagtggcgggatctcagctcactgcaacctctgcctgccaggttcaaatgattctcctgcctcagcctcctgagtagttgggattacagttgtgcgtcaccacacccagctaatttttcatctttttttttttaatacagatggagttttgccatgttggccaggctggtcttgaactcctgacctcaagtgatctgcccacctcggcctcccaaagtgttgggattacaggcgtgagccaccacgcccagccagatccactttttctaactggccatttgtattagtctgttttcacgctgctgataaagacatacccaagactgggaagaaaaagaggtgtaattggatttacggttccatgtggctggggaggactcagaatcatggcgggaggtgaaaggcacttcttacatggtggtggaaagagaaaatgagagagatgcaaaaccagaaacccctgataaacccatcagacctcatgagacttattcactaccaccagaacgctatggggaaaccgcccccatgatctaaattatctcccaccgggttcctcccacaacatgtgcgaattatgggagtacaattcaagatgacatttgagtgggaacacagagccaaaccatatcaccatttgagctgttgttgatttttttttttttttgagatggagtcttgctttgtcgctaggctgtagtgcagtggcacgatctccactcactgcaacctctgcctcccgggttcaagtggcacgatctccactcactgcaacctctgcctcccgggttcaagtgattctcctgcctcagcctcccaagtggctaggatgacacgcatgcattaccacacctggctaaatttttaacttttcttagagatggtggtctcgctgtgttacccaggctggtcttgaactcctggcctcaagcagccttcctgcctcggcctcccaaagtgctgggattacaggtgtgagccactgcacccaggctgttgtggattttaatttgttttgttttgttttctgattttgtattttctcttccttctattcttttctcttcagatgtattcatcgagtacaatttgtgctgagtcatatcacctatttatattttaattttactattagttttgggaagtcttaattatttttcattcaggaaattgtacagtcatctgtttccattcatagcccgtccccttctccaaagagaacgtctgataacaagtttttggctactgtgtaatatgatatttttctatgtaagtgcatgcacatgtaaacaaagtaaaacatcatattaatcacatagacagcaagtgtatttcagcttaaagggtccatagtaagccttactttttttttttttttttttttttttggagacagagccttgctttgtcacccaggctggagttcagtggtgggatcttggctcactgcaacctccacctcccaggttcaagcaattctcgtgcgtcagcctcccaagtagctaggtttacaggcatccaccaccatgcccagctaatttttgtatttttagtagagacagggttttgccatgctggccaggctgagtgttggccaggctgatctcgaactcctggcctcaagcaatccgcccaccttggcctcccaaagtgctgggattacaggcgtgagctaccgcgcccagccagccttactttttattttgaaataattatagattgacaagcaattgcaaaaccagtacagagaagtcccaagaacccagttttctctgatggttgcatcttacataactataggacggatcctccagctgcagttgccctctagccaaagacccaccaagagtacacctctagttgaataagttgcatttattactcattgcagtgagggagagcacgcaccatggggcatctcagaaagtgtgtgttaggaagaacctagtataggatttgggttttggttgggtgacttgggggaggtcgaagggagtgggattcacactagatgaattgcatctgctgtcagaaggcagaggcaagtctataactgtgtagcttgagtcctatctctagggagaggaggctggcattgggggctaaagctgtgactggtaaagtagcagcagtcactgctttcagccaagagagggtgatgattggtattttgtgggtggcacagtgaccttgtctttatgggttacttcaacaaaaattaggtagtgaccttgttttgtctcacttcatcatggcctcagagtaaccttgtctgaggttgtgtcttttgcgattatgtctaaaaggagaataacgtggtatagccgtgaatgccaagccagcttcccgatgtcaggggcttttattccagatctttcgtgtacattggtaccatgcctgcgtatagttctctgccatttcatcatgtatgtagatttgagtaaccaccactgcaatcagcatccaggactattccatcaccacgaagatgtcgcttgtgctccccctttaacatcacatccacctgcctgccccaccaccatccctaacccctggcaaccactaatccgttttccatctctattgctttatccctttgagaatgccacgtacatggaatcatacactatgtgaccttttgatactggctttcctcgctcagcataatgcccaggagatccatccaagttgtcgtgtgtatcaatagtgtgtttcttttttagggctaagtagtattccatactgtgtgtatttgttttctatgactgctgtaacaagttaaaacttagcggcttaaacaacacaggtttttaatcttacaaccctgcaagccctctggcatgggtcttgccagaccaaaatcaaggtgtcagcaggctgcgttcttttctaaaggctctagggaaaaacccatttcattgctaattccttgctaggggaattcaattccaagtggttgtaagactaaggtttctgttttcttgctggctatcagctgagggctgttcccagtttctagatcaaggccatccacattccttggctcgtgaccacctctgtctgtgtcaaagctggcaacagcagatggagttcctctcaggcttagaatttctcctgcctctttcctcatcacatttctctgactcaccttcttgcttccctcttccacatttaagaatgcatatcatttggccgggcacagtgggtcacggctgtgatccaagcactttgggaggccgaggctggcggatcacttgaagtcaggagttcaggaccagcctagccaaaatggtgaagccccatctctactaaaaatacaaaaattaggccgggcgtggtggctgaggcctgtaatccaagcactttgggaggccgaggcaggaggatcgcgaggtcaagagatcgagaccatcctggccaacatggtgaaaccccgtctctactaaaaatacaaaaattagctgagcatggtggcacacacctgtagtcccagctactcgggatgctgaggcaggagaaccgcttgaacctgggaggtggtgattgcagtgagccgagatcgtgccactgcactgcagcctggcaacagagtgagactccgtctaaaaaaaacaaaaaacaaaacaaaacaaagaacaaaaattagccgggcatggtggtgcatgcctgtaatcccagctactcagaaggctgaggcaagagaattgcttgaacccaggaggcgaaggttgcagtgagctgagattgcaccactgcattccagcctgggcgactgacctagactccatctcaaaacaacaacaacaacaaattcttatcattagattattctcacctcgataattcaggatgatttcccatctcaaaatccttaacctcaaccacatctgccaagttccttttgccatgtaaggcaacatattcacaggttctgggaattaagagtgtggacttctttgggggaccatcattctgccttactcattctggatgtaacacagtttgtttaaccattcatctatagaaggatgtttggttgtttccagttttggggctattaaaaataaaggtgctgtgaacattcttgtaaaaaaaaatggtatataagtggattacacaccatttccttttgcaactgatttttttcactcgacatcatatttctgagttgtattcatgttgatctctatagctctaggtcctttgtagtgccattgtgttccatgtgaatagtgtcctcccttccttgctgtgtaatgttctattgaatgactgttcccctattggtggacatttaggttgcttctaactttttgctgctacaaagagtgctgcggtcagtatctttgtgcagatctccacgtgtgcaggatgaagcagttttcttgactggatgagtaggagggaaggttctggccctagcacatatgtgttgtcggttcctactggctattgtgtaattgttcttcaagcccttttcactccatcagcagtgatgaaagtgttctgtgcatctctgccaacatttggagtcgcagttctttttaatttctagactggtttctttttcatttcttttacttagtttcttttaaattctggactggtctaggacctttccaaaaggtatgaaatggcatctgagacttttaatttgcattttcccgatcactgccgaggacacagggacaccccagtccagcacctccttgttctacactcttgctgacttcttttctcctgacgttagcgttaagaggttgctgcctctacctgcctttaagtattaagatctgggcgatgcaacccgacaactgaaatttggtgtcttgtctgaaattacaggatgttcctcaggccgccgtgtttccatgggaacaagtaacagtcatccttcatgattaggtggtaaccatggcaaccaagccagcagcatttgaatgaaactgattttattttatttattttttgcaaacacatgaaggttaaaatgcatttctccagctgtggcttccaagaataggaagacagcctggtaaatggagaccctttccacctcctagaggaaaggggatccaggatcagctggtcccatggcctaattttgcagactaggtgaccgagaggtcacatagaagtcatgcaatgagtttgagccgaggaggaaagactgctggatcatgctcgaaggtctggggcgcactcttaagagatcggctgggtctcccttcccgtgatctaaccctaggaatgccactttcatactgtgtgatcttagcagattcacttcacctctctgggtttctactggcaccagctgtggtgctagacctatgggaccatgaggccaggcctcccagtgtctgtttgcccaaattagaaaagatttgctgcaaaatgaaaggccaaaggcagcatgctggggcctaggaccccgaggctgaatccccagggtccagagttagaactcagggtcagttccctgccttcttttcctgtgtaaaataatagagggtgtgtgtgtgtttttacttggttccaaggactggagatgaccactgctcttactccctgactcattggattgatgaaatcagctcagagagagaaaggggcagccatggagtcacacagcagagtcagggttgaatccaggctcctggtgtcagcttggctcctcacccaaccccatgctccatgtcccctccatcttctctggggctggaagtgtgggtttgggggcagtttaagggactttcggcatatactcttgcttcttccctggaggacttttagaggtagtcacttttgcttctcagaacttcagtttctccatctggaaaatggaactcactatagagctgcccaggttgtcctgtgggattacatttgaaagggtccagaacatgcattctcagcaggggcgagattgcccctaagtgggcaaaaagttggttcttgggctagaagatgaaaaaaaacctttctgtacaaagcccagtatacacacagtacataaaagatactgtatgtctgtgatattaaaattttatggaggggaaattaggaaaaaagtgtctaagaagacttttaagggagagcgacaatgaaaaaacattgagaaacgtgggtccagaacccagcgatccatgtcttcattaactttgtgtttagagcttacggcaggtggctggctccgtggggaaggtgtgtggggtgtcaggtcaggagagagcctggcctggcccagactctgccctcgatgttcagtgtgaccacgggcacatcacagctcctctcagggcctggtttccccatctgtgggtaaaggaggtcccatcagctccatgggtgactcccaggcagttgagctcccacctggtggatcagttcagggtctggagaaaagcaggtggtgcctcagactatggtgattagaggagcgtttaatagaggggctgcttatgaaggcgtgggcaggcctcgggaaccacggggcagtgcaggaccccaaagctagggacagcgggggctgcttccctgaggccccatggaggaggggagagcgtggttgctgggaggcaaaggtccagaagatagggtcatcccgatggtggctgggaccttccgtggaggaggcaggcagcccagatgactctccctcctcccctcatctcttgccagggttcctctttggccaaaccacatggaagttgagggtctagaagctcagatcataaagtctatacaggccagtgccctggagcagaaggcagtgcacagagacgtggagaatggaactaggggccacacaggagatacctgggaaggtgccccaggtttccctccagtttcgtatggagtgcaggccttgccctgggtgtgggctgggagactggagaggtcagggaggagagccagccgccctgtgcaggagggagagtgggcccctatcctccggccacctgggatccttgcggccttcctagcttctcaggtggaggggtgtagccagggcttctgaatggaagttaaagacttctgggagcactctttgctatagacctgttgttgagggatcacacacacatttctttgcttctggtctcagcttcatcatctgtcgaatgggagattggaccaagcaacctctgagagcttcctggcccagacccaggaggcaagaggcaggattctgggcatcagtgttggtctcagtggaaagacatcctcaccgggcacccagtgttctaccagggcactccatgcacctcttgcctggagtggtgagggcccacctacccaggaaagtgtaaagctgtggccagggtggtgtgtgtgtgtgtgtgtggtgtgtgtgtgtgtatgtgtcaggagagggagggtagttcctggaagctccagctgcttttgtcctggtgatcccaagacccctgtggggcagcctgactctgccaaccaggttccataactgcagtgggtaccccgtgtttgttggtttgatggaggcatcttgactaagcactgcagggtgcctggctctgggtgggggtgggaaacagacaacccatcttcctgctgagtcgccaagtagcaagtctgcagggctgactgatgtgcggggttgtgagtcatccttcctaaagtgatctgggcgcccccagcattgccccagagctcaaaggatgacagttcccgcaggaggccattccagggaagagaattctagggagggggagagcataggtaaaggtgtggaggtgggacattcctgcatcgtggcaggtacagcaaagagggttagcaagaacagaagccagagagtgtgtgaggtagaatggctttcggtgccaaggtgaggagtcccttctttctgagggcattgagggcattagaagcagtcgggcttagggtcctgactgtgcctggcactgcccatctcccacttctaccgctttccctagaaaggtggctgaacccgggggtctgcctctggctaaggtttgcatcctgagactaagccctgagtacctcctatgcgttggccccttggctgggtgttgggacccatgggacttaaggctgaaggagccatggactcggtccagacacactggaccctcattcctgttgtggtgctcagtagccctgtgaccttgggctggtgactgcaccctgagcctcagcttctgctctggtcattggtagcttggctgagtatagcagatgggacacaggttatgggtgacagcctcccagagggaggtggcatgtgctgtcacagaggacaggagggtgctccaggtgggtggtgcgaaggggtgagagatgaaggcagacaggaaagcatgggaagaattttcctagcaaaacctccagaaagagtggttatcccctgactgtgactagagagattgtggaggaggaggtccaaggaaagttctaagcaggaagcaccgtgcgggaacagcaagggccttaagagacggcgccaggctgaggatgagccatgtgggaagggagcttttctggaagaggcgcctggggctggatggtctggacctggtgtcaatgcctgccccaggcctgcctggaggtcagcgggcctgaaccagtctcaggacagctttgcctgcttggccatgagccaaggctcaggatgaagcctgtgcttctgtggactcctgtccatgtgactgtgtggagggaatggcctggaaagcacacagtgccccagcatcctgttctgccttctggaaagcctgctccttgtgtgaaccccatgtcatctgtcctgtgtgtgtgtgcgcacgtcccctgctcagtaggtacctggggtgggtctgggagtgtacacattggagtatctgcatgaatataaacatgcacatgtgtttgtctgggcattaccgtctcactccacacccctgtgtgttcacacctaccagggaaacctctgccctgtccttcttctcccttgcgagtcaacaggtctttcccaggcaccccccacgcaccaggctccatgcagggtgctggggaggtggagatgcaaccagcttaggcgtaggtgttaggagttctgcagacgcacacacacacacacactcacacacacacgcacacacactgcaaatgagagcgttgataggagactcaggtctagttattgctgtaggagccaaaagcgaggcaagagctggaagtagagggggtcacccaggacctcctccagggcctgcaggatggaccaggctggggaaggggagcaggaagggagtcctctgttgggggccacctctggagcaatggcaaagaggcagctggtgccacgctgttgtgggggaaccagtgaggaaagtggccaggttggcaggttggacagactcaggaggttttatgtaggtgtgctaaggccatgactaaaagttttcaatgagctgtcaccatttaagagtcagaatacttcatattttgaaaaacccagattatcagcctctcttgaaccatggcagctatggctgccctgagcccctccttgtgatgtagcagtaaccaattagcgccgagtggctggctgctttcctagattctggatttcctgctggcctctgtaggcctcccaagtttaaagcctctggaaaataactggaagccagaagtcacagattctcatgtttgaaaaaacgtgggggctgacatagtggctgagccctgtaatcccagcactttgggaggccaaggtgggaggatcgcttgaggccaggagtttgagaccagcttgggcaacaaaggaaacccccatctctacaattttttttaaaaaaattagataggtgtgttggggtgtgcctgtggtcccagctacttgggaggctgaggcaggaggattgctcgagcctaggagttctaggctggttgagtatgattgcatcactgcactccagcctgagcgaaagagtgagaccctgactctaaaacaaacagaaaacttgagaagtcatccaagctccccaagtgtggcatcccaggagatggctcagttatctgtctgcttatatgcctccagtgacagggagcccactacattacaaggagtgggggttttggggaacctttccccccgcttttttttgagacagagtctcactctgctgcccaggctggagtgcagtggcacgatcttgggtcactgcaactttcgcctcccgggttcaagtgattctcccacctcagcctcccgagtagctaggactacaggcacacaacaccacacctggctaatttttgtattgtcagtagagacagggtttcaccatgttgaccaggctggtttcgaactcctgacctcaggtgatcctcccgcctcggccttccaaagtgctgggatcacaggtgtgagccactgtgccaggcctttttcccccctttttaaaaaattgcgataaaatatgtaaaacataaaagttatcattttaactagttttaagtgtacaattcagtggcatgaagtccatttgtaatgttctgcaaccatcaccactatccattcctaaaactcttcatcaccctttacagaaactctgtaccattaagcaataactccttgttcccctctctcatcagcctctgctaacttcaaatctgctttctgtctctacgaattggcctcttctagatagttcatataaatgggatcatacaaaatatgtccttttgggttactcagcgtaatgttttcaaggtccatccacattacagcttaaatcagaacttcattcctttttagagcagaatggtattcctttgcatgtcagtaccatgtgtgtgtgtccattcttctgctgatggacccttgggtttccaccatttggctgttgtgaacatttgcatacaggtatttgagtacttgttttcaattattttgggttatacccaggagtggaattgctgggtcatgtggtacttgtatttttaatttttggaggaactgccagacttttccatagtgcctggaccattttctagggaccggtttgtctgttgtcctgactgggatgggagtggcaggaggccctagctgtgtggccttggctgttcttgttcaacctctctctcctcctctgttggcagagtcgcctcaagaaaggccgggctctcggcgcagcctgcctggcagcctttccgagaagagccccagcatggagccctcggccgccacgccgttccgggtcacggtaactatctctgcgtcaccaacaccgccactgccaccaccatcaccacctcgcccggggtgctgctctgtgaccccacggccccccttcctggagcctcatggacccggagagcatccggcctcccttgctctaggtatccgatccctcagctgctcccatctccgtggctcagccctggtcccgggggccacatggggggtcccatcctgagagggagggggcaggtggaggacagacagcaccgaaggctatggggcccagcgctgagctggcccggaaagagaagaggctcttgttagtttagataaatgtacccttgagggcgcacacacactgtgcttctgcaaccccgaaaagatgcactatttttgtttccatatattttaacacctctcatggcataccataatttaaatctttcttggtggtacataaaataatgctatatattataactgatgatggcttagaaccgacaaaacacagaatatatatcatagctattgaactgagtggtccccacaagcacacagactttttaaaaattacaaacctaaacaactttatggaaacagaacccaatgacccttaacgtctgactgttcatacccttctgcatttgtgcatgtacacacacacacacacacacacacacacacacacacacaccagagttctgggtcccttcactccctcgttcaggagcattactgtgtgtacctctctccagggctgtgccaggcaccagaaacgcagcgatgacatagacacattcctttctccacggagctcaggtctgtaggtcaggtggatgttggatggtttgttcatccattcattcactcatcagttattctggcatgcctgctgtgtgcaagcagaggaaagaaggttctgggtggcaggaacagagagtgtgcaggcctggctgtcactggatagcatcatataggggctccaggggagctggaagtgattggctattcacagtgggttgggagggggtcccacgggagctggcttttgagctgcatcttgaagggtccgtagaaaatggctaggcaaggacagagagagagagagagggacttccggggagggagaacagcagttgcaaaggtatggaggcaccctagaaatttcctctgcttgccatagggctggctcctcatcccttgggcatcagctcagatatcagctcctgaccacaccacctcaaggaagccctcttgcttttccgccatcacagcagcctgctcttctgtttcctaatacttagtgtcagcatgagaatgtgagctcataaggtcaggggctgatgtgtttgtggcatgcagaactgcttggtggagctggagttgaggggatctggaggacagtgtaggaggtgaggctgggaggcctggccgagtcaaggtcacgtggaacctccagtaccaggccaaagggatggggctttccccagggccactgattctctccactgccagtatgttataaaaatgccttaaaaactagcttattgtccttctttaagatttcagtccactgggccagggcagggcctgggaacctgcattttaacaagctttccccaggaggtgattctgagtccccagctgggggttgagcccatgggcaatgaggaggaagcctgcgctgagacgattcagggtcatggccctgagtttggccagggggtctcaggaagctggtctccagcctgcagggagcgcttggaggctgggacaagggtgacccccatcagctggagcgaagaccaagttctgatctctctggatccctggggccacagcaggcagggtgggccttcagggggaccctagggaacgatgactaataataattagtaatagtagccacctccattgatgaagtgcctactgtgtgccaggcactgggctcactgtcctacatccctgatctcttttttttttctttttttttttttttttgagacagaatcttgctttgtcgcccaggctggagtgcagtggtgtgatcttggctcactgcaacctctgcctcccgggttcaaatagttctcccacctcagccccccgagtagctgggattacaggagcctgccaccacccccagctattttttgtatttttagtagagacggggtttcaccatgttggccaggctagtcttgaactcctgacctcaggtgatcctaccacctcggcctctcaaagtgctgggattacaggcatgagccaccacgcccagcctacctgatctctcttcatccaggagacacacctacagctgaaacattggttaccccatttcccaggtgaggaaacaggttccgagaggtaaagtcacttgctgcccaagctccaactgctactaagtggcggaaccaagattcgaccccaggtctctgtgactccagggcatgaggcacacccatcctcaggctaggaggcggatccattgccccacacccccccagaaccccatcagcatcgcttttccggctatttccctttctgagttgctctaataggggtattatcacaccttaaagtttttataatttgcagctctttaagtgacagctaggatcagtgttttccctgtagtggtgtcttcattctgtctcccagggtagaaaccaccttcagtcagagccagccttgggaacctcgagctgcctgggactcaactcgcagtcccacctgcccggttagggtctgcaggatggagagcgtgttcaaggtggtcgttttgcccacttctcatggcaaccctctaggggaggcaccattagtgtgcccatttcacaggtgaggaaactgaggttcagaggtgaaattctttagctggtgtcactcagctcctgagtcaggactgccggacatctacgttttgtgtcctttcctgggcaccttggtccttaagagatgtgatttgagattctcttctgggctgggtgctgggagctgaggggactggagaactcagaggtggggatctgggttcaaatcccagatcttccatgacccatgtgatttcagtagccactgagcctctccgagccttgtgttcttgacagtaaaatctggaatgacagactttgcttggactgtggacttggtgaatgtggtcgcccaagtctgacccatggtaggtgcttcatggatgaaatccatcattaacatccaaatcgggtttccatttttggctgtaaaacatcagtaaagatctaggagggttggagtacaggcagaggacaaggtgtttgggggaaggtcagtggtgagcctggcctgggccttggggacagtccctcacacagaccctgtgcagggccagaagcaccctcctccctcccctagcccgtagcacacacttgctcacttacaggctcccaaaagctatgtcctcacgtgctcagctgacttttgctctgtgtagaccctcgagggaacccaggaaacatggttttgcctcggggaggcaggggagatgccacaggatgtactggaataactgccaccttcactgccatttcaaacccagatggcaggctgtcagcatctcttacaggggtgctccgcagggagaatcaatgagtcacggtgtaaggtctacaaggctcagcctgtccaccttctccatggaaactgaggcctgggaagggcttgtcagaggtcaccacccagctgacagcagttcaggagcctgggttgtttacaccatcacatgccacccctcctcattttgtgagtcagccgaggacctgcagccactctgtagggcattgaaggctcagtgctagtcctgcccctgcctcttgtagactgtatgaccctgggagagcctcagtttccccttttgtgaaatgtgggggatggactttgtaaggcagcgtacagttcaggcataaataggtgcttaaatgttctggtgcagtagctaagagaatgggctctagagagttccccgacccaggtttcaggccctgcacagcctcataccagctttgtggcttgctcaggagtggaacttttctgcctatctgggacaactccctccctcctatagggagagttggggggtaggggagtggctctccaggaccacacagtgctacgaggctggcatgtgccctgcaagttatagggggccctgaatgaggatgggggaaggggcctgggagtagatgaccagagaggcttcctgtgcatctgtggccatcagctctcaggctcctgagattcaaacccaggtctgtctgctctgtgccagtagtgtctcctggaagggaaggagggaagggtggcaggcagcaagctggggccctggatctgcatagaccaatggtcagactgggtctgggggctttgcatgtgcccacccagcttccccaggccctggaccccttagcagcaacagcatgctgttctttctctcctgccactccatggcagaggagccgtggtttgatttgggaggcaaagagctgatgactcttcctggtctccccacgagctccttagcctgctcccttccccagccccaaacttccctgttgcgggctgggtccttcctccctccctccttcctctgcccccacccccctcccatcaaccttgaggatggctggcaggcctggggtgtgggaggtggcagaggctcagggaaacttgacagccaattgattcctcctcgggaagttgaaagtggagagtcgtgtttgaaggtttagctgaaattaggtctcagggctattttttgcgagatggagaaggagaagtgtcagggaggggaaggcccaggggtctggcagaaactgcagataaactcaacattgggttgattatggatgcttctaggagcaggtctttggtttctttcaacaactcacttttattggtgcttggttgtgcacaccctgcataggatgctgtgacagaacaaggaacagttatctctggccaggaaggacagggaagaattcttaaagaagggactcttggggctgggctttgaggagtgtataggagttcgtcaggaaccaagggagaagagtatttcagttagtgaagtgaatagaaggaaacaagctaatggccctgtgtgattggagtgctggatgggttcagggcctggagagaagagtgagagaccttggtgggtgagctaaagcctttggactttcccctgcaggatacaagaaccacagtggatgatggctgtgagtggagctagcagtagacctctgagctgtggacctcaggttttccagctgctcaccccttttctcactcctgtagcctccctgcaccctccccatgtttcagctgtctttctgtcacacaaactcaagaaacaggcatgtgaacacaaacatgcaagctagtgggtgaccctcccgcccatgtcaccatggaaaggctgttggaaattaactggttcaacccttccctatacagaggagggactgagaatcatagacgggagggtcctttcctgaggtcacacagcatgtctagggtagggcctggagttgagcccaggtctctgtccctctcccccgcatccagtggtcctcaccccttactccttcctgtcctctcctcccagcacctggatatcagccaccccgtctgagctgagcccttctcccagcccccatcacatttcctgggaggaatgggtgttctttggtccaactgccctcggagccccacgacagctccttcccgctcatctgcacactgccccctcctggccaccaggccccagccccagctgtagagggacccgaagtttgggctgcgggctgcctgaaggaggaatgcatgacttcaggtccaggagggggcattctctgctccctgcagagccggccccgctgccccccatttgtgccccttccaagctacggaggctccgggtggctgttggggtggggaacagaaaagccagccaggctcacagatcagacaagccagatctgtcccagggtatatggggaaactgaggcctggagaggagcagcttgcccaggatacttgctggggctccctccactggcccaggctgctgtgggtccatctcagatggtcgttcacttgggacatatttatgtttgtggcccatcaaccagtggagggatgtcagccacgtggtcctggctgtaacagggcggtagtgctggacccctgggtggggtcccaccatgggcgccccagttttctccttgaagtatgaggaatttgcttagttctgctctgtgagtcagtctcctgacccagcatccggcgtgtattcagcggatgggcggggtggtggaagagcaaaccctgccccctccgccccctccaccctcactccctccatccctgcccttcacggaggctgattggtattaaactattcaaacccaaaaggaacattaccgtcattttggtctgtgtctgccttccgcggggggcatcccccttttctgcagagggagtgttggaaggtgggactcaggagttgtccggggtggccagggtggggcaaggatgttcttcggggcaggagtctggggacagggggtcttggagcctcctgaatccaagaccaggctagtctgaggcctgggacagaggtgggactgctgcagtattggtagggttgggaggctgtcgccccaccccattaatacacaggaaggtggtttcatcagctccattttacagttgaggatcccaggcttagggaggagagaggcctggcctcagcaggtctccagctggtgggtggtaggggcaggagcccagctctcgtctgcgagccttgctgcggtgtgaacgaacttactttcttctctccttttgcctttctttattctttctttcgataaatttgccatcatcaccaactatgtgtcagggcctatgccagtcattgaggatacaaagaggatgaaaacgtagttgctacctgcagaaatacagaagggccagccggggcttggtgaagtaatttccaggcaggtgaaggggaaaggacattccaggcaaaggccaggacatgggaaacagcatgagcaaatgacagcaggaactgagcgcagtttgggggctgaaatgtgaggaagtggctggaatggaagcgacaagagatccacggcagtgaacagagcagatgggatctaaggccatattaacaggagtatgaggtcctcagcaagggaggtgaggtgggccagagtaggccagagcagacatggagtgcagcatacttgaccaggctaggagagtctggagctccttcagtgggcagagaccaagactgggtggggatccagcatggggttggggggacaagcaaattgcttttctcaagcaggttctcaggagcctgttccaacccccccaacatctgtgctcagaatgcccttgggcaggggtagggggaagagcccacttcaaggatccctggaatcttctgcctcatcctggcaagtggcagctggcttgggcagtgtgagtgaggaggatggaagtgaagggaacaagccagcctctgtaccccctcctcttcctgccctggggacttccaaatacatcagaaggccatccctgtaaattccatttccccagccctgcacttaagcctgttgggcagcatggaatcagatgaactggttcccgttaaggtgtaaaggccaccaccccagtccctgccaggttcagtaactggcgagtggaatgctctctgtgggggcctttcttcctctcttcacacccactcagggtcttggggtacagtgctggcctctcccagggatagtccccccaacccagggatgaagcaggattagaatcttggccactgctcccttctgtaggatggctcaggcaagttgccccactctctttccctgtctgtaaatgggcaggaacccctccccacagagtggctgtgagggctcagtgcctggcacaaggcagcattccccacacctgttccctttgcttgtgtgaggggtgcacctccaccccacatttcctccagagccccaggtaactgggcagacccctcccacttccatacccttccgtcacggccccaaagcaacatcacccctgactgaacttctagggctcagccctggcagtagaaggtggagaggggctggaggggttcctaggggaccagagaccaagttcttaggtggtgagttcagatggagatggaggtgtctgcgcagggtggtttcctgccagttgggggcagcagagggtagcaagtggacttctgggtggctcctcccagtgagtgttgaagtcccaggggtttgtgtgtcaggggccacagggagctggcccaacaaggtgttagctggctaaacaaggtgtagaacatactgctgggggctgggagcagctcagatccgggagcacctgtcaatggctgggcctggcatgactggctgtgccagctgggcctaggttgaccagaaagccaggggttctgaaaggggaccctggtcagggacactggatggaacaaggtctggggctgggacagctgtccaccaagagaaagggcacagggtgaggtggaccagcatgtgatctgtcaggcagggctgctgcactgtggtcaccaggctggggccaacagacactcagtcactgccaccctttgatgggttataggcacctgttccacctaccactgctttgagagggggtaaggcgggcattgtgggagaggcagggtggtggtcagagcttgcactccaagtcccactggcctgggttcgaatcccagctctaccacctctgctgtctgtacgatgggggattttgaatcctgttctgcatagtactctgagtcaggccctgtgctgagcactttctaagtattgtctcatttaatccttacaactcgaggctcagataacacaaatctcactcatagaaggtgacaaaatcaaggcagatggggagtgaagagatagctgagggtggctcctctcatgggcctggatcttgaagttctcacagcgcctggaccatagcatgcagcccagtctttgctagtcagtgctgtttttctcttcatcttacggacgaggatgttgaggcccagagaggggaggtgcattgtcctgggccacacggcttgcagggacagagctgagatttggacccaggcctccccatctctctgccttatcttgtcctgcccctactttgagcaggcctggccctaggggtcagacacccctgggataggagagaactgctctcctcttgtcatcctgccctgtggccctgcaggtcctcccctttcctgggaggtgggggagcctgcatgtcaggggcaaggctcagacgccttcattttcccacctcctcatgctacaaaaatgaaacgatcaagtggtattttggtgggattacagacataattatatctgagttgtcaagcggcaattgttgtttccaaagccaggaggccctctgtggaggtggcagcagtgacatctgtttctaacacaaggctctgcatcgggatgagtaacttctcctgtggaattgcttaaagaacgtctaaaacgagctgagcttgttactcccctgctccagcaccttagatggctcccagcagggtgggggatccagctccccggcctggcattcaagccccccaggctgtcccagcttccacgcctttgtgtgggcggatccttctacccacaattcctccccatctctctctgtctccagagctcactagtgccatccagggctctgtccaggttgcagaacaccccatctgtacacgctccctcacggactctgtgacttcatgatccatcacttctgtctctcccaccagacggtggtcaccttctcaaggacagggactgtttctgatttgtctgaactcccagcactggggcaaggactcacctgtggcaggctcatgaggggcttgcggaatgaaggtgcacgagacagagagagacagggagtaaacgaattaaatggagtaagcgcagggtgagcagggaagagggtgagccgtgacctctccacttctgccagcccccacacttctgccagcccccacactgggtgtctgaggccagagtggtcccctgccttgggaggacaggtcaagacaagtgacccagcccaccagaggccagcaaggacaccagcccttgccttgaaaagtgccggacgtggtggctcatgcctgtaatcccagcattttgggaggttgaggtgggtggatcacctgaggtcaggagttctagaccagcatggtcaacatggtgaaaccctgtctctattaaaaacacaaaaaattagccgggcgtggtagcgcatgcctgtaaccccagctactatggaggctgaggcaggagaatagcttgaacctgggaggtggaggttgcagcgagctgagatcgcgccactacactctagcctgggtggcagagtgaaattccatctaaaaaaaaaaaaaaaagaaactgaccttgactccaccccatacccatgggccttctgaggccaggactcccaggtgaaccttggcccgcagatggtaaatcacccaggagaaatagcctataaaatcctctcctaaaatggtgcattttgtattctgtagtgaaaagggcttttaaaagcactgcttactcaggtggatttatggagtttcccccacccctccctcccactagtgtttactggtcctcagtcctggagctccctggggtcctgttttttccttggtggctcttggtccagggagagaaacaagatagcatctctttcctgccttgctgccttggggccccccgggccagctgggtgcctggaagtgcaggggaatcctacccaacagaagctccctgtggcccagcgcaaacctgaaagtcccaccattagtgcccatttgtccccgggagactccccccccatgtgttgtcacctgcaaatgggtcaccagggaggcacaacaaagctggaaagaattcagagatcagctagactaatccccgcattgtacagcagggaaactgagtcacagagcagcttaggtgctggctcaacgcctcagtctggtaatggaattacatgagagctttagctctggagcagcctgtctgctgtgttgaacccagctctgccgcttcctgaccgtgcggtgctgtgcaaattagttgccctttctgaacttctgttctcccatctgcacactgggttgtgagaattaaagagaagtcatgggaagctctaatacagtgcctgaagcttagacagggcttactaaacacatctgactaattctcagcagcgtgttggaagagccctcattagtattaatagcagagctgggttttgaccccagacttatagactccaaacgtggttttcttgccactcatgcagtgcacagagcacaggataggggagttttgctggggaatgagcactaaagtcagcaagccccgggaggactggctgggacctcagtgataggacgtgcaggcaggcggagatagtatagaccctgctgcaggggtgtaacctcctggtggaatcggcttccttgcagccacgaggccctgggtatccaactccccaccccttagccagggctggctgagagcttaaagagctgatgaggtgtttgtagccatccagacctctgggacaggcttattatgctaaggcaagtgtcagctggaggatctatgggacaatgagtcactccctggctgctctgggttgtcacatcccaagctgagaccttgggaatgcgtaactggtttctgttcgctgatgcccgcctaatcctgggcactggcaggtaccaggagggctctgctgacgtcctcagctcccctcccagcttcacctttaccctcttcaaatctgggctcccctctttttcctccgttagactctcagtgttccttagggttcccctttacttgggtgtcctctgccctggggaagggattacaagcccaggctcaggtggtggtgtataacttggaggctggagggacctgtgataactccaggggcctcccagggcagccagactccccgctgtcctacctctacacctctgcttatgctgtgagtctgcctggaatgcctttatgtggctatcctgccccagccaatctcagcaagcccacctgctgtcccaccttcaatgtttctaaaatgctgtcaaaagctgcctcctccagcaagtctgcccagattgctcccaagtgaaatccttttaaaaagccccacagagcactttatctttttccttttatatcattaaatatttgtgaattcattcaagaaatattgagagaatacctgccaggcgtccagcactggagacccaggttgccatggcccctgctctggaggctttacagtccagtatggggtgggggaggcactaaacaaacacacttataattacaactgtggtaagtctacagggagacctggcctagtgtggggacatccggggaggcctctaagagaaagactgaggaggtacctgaagggtgtggagagtcttccttcccaggcaggaggaacagcccaggcccttctggctaacggctgggctggtctctggtggtcaaaggaagtgatagcagtgagccgagatcgcgccactgcactccagcctgaggacagtgagagactccatgtcaaaaaaaaaaaaaaaaactatgaccatgaaagtgatcatgaccgcaatgatagcagttcgtatttattgtatgcagggaaatgggctaagtttcttccatgcgtgatctcattgaatcttcacaactacctcgtccccattttacagaagaggacacaggcatagaaggttaagtcatgagcccaaggccccagagccattaagtggtggaatcccctgctcccaccttcttccggaggaaggatgaaaattatttacattttacctggggattcctagagattgaattacccttaggacctaaagaggtgtgtcaaacagtggaatttcagctgtactgatgggcaggagaaatgtttagggcaggaagcttcagctcttgccagggaacagaactccaaaagtcacaggttctgggagctgtaagctgtaaaaacgagctttgagtgtgagagaagcaaacaaattgtccaaagtgaagccctgcgagaaaagcagggggagttatcttggaagccgttaagagctgttttcttgccttggtcctgagatctgggctcctaactctggagcttcctgggccacttgcccttcctgtcctggttgtgaatgtgagcacgtgagggccagcgtgtttagcttgtgtgtctgcacaattctgctggtgcctgatgatagctgagtacatgtgtatatttattggcttatttcagtgtatttgtatgttagcttgtatgtttcatggctgtgtatgtgtgtattcgtgtgtgtgctgatcaatgtgtatgtgtttgtgtgtgtctgtatgtgtggtggcactggggtacttgtatgcttacacatacatttctttgtgggatgcctttcctgtgtgcatttgtatgcatgcctgtccttgaacttgtgtatgtttctggccctgtatatttctctatgagaacatgtttaagtgtgtctttccaggcagtattttaactcaacagtgaccctagagtgtcagggtccagcctcttcctggggcttccctgaaggctctcaaggcctatgaattggttttctttgtttgacttaagtagtctggctaccttctccaggcggaatatgtggcgatctcactggtatgagattgtagaggattctgtgggcatagggtggcctgtgagtaggtggccaccaggaagtcaccaacttaatcccagcttaaggtgcctcccctctttcgcctgtcacagtgtctgacattccattagtgagtcattctccagctgggactctctttgatggtgcatacccttgaggggaggaggccagagaagcccggcagcctgctgagggtagagaccggggaacagggaaggggagggcaggaggaatgacgcatctgaaggatttgggcaaagccagagaattccctgatgccattagtgcctagcttggggcggcccaggcaccctggccctggcagctgctctgactttatagaatcatcaaatatcagcgctggaaaggagcttggtgatcacccagtctagcccctagtgttgtagatgggaagactgtggcccagaaagaggaagtgtgggcagactgggaggttcttgaagcgtggatgctgaagatgcaaagagcactgggcaaggagcaggggacccaggttctaatggctccgcctggtgacgctgggcaggtcccactgccctctgggcctcagatgtctcctcagtgtcactggcctggctgccctctgtgggccctcctgactctcactctgtgactctggaagcaggacccccaccacccccagcccttttctagtgcccccaccagcctgccgcggtgtcaggtcggcctgccagctcatgcacccagcatctctcccctcctggagccgagagaggtggcaggatctggatgggatcttctcctccctttcctgtttatttagatgtgcttttggcattcgggcaaagccccagaaagatattgagagacatgcctgtcaaaacagtctcccttctccaaggctctctctttggggatgggccttagaaactgccatgggaggagccgggccttggcggagggagggcccacagggttctgcctccatcctgagtactgtcttggggttccccagtgggcagctgagagcttaacgggtgacaaagttctgccaggcccacatgcccatctgcagcagcccaggtcagtctgttgaaaggggagagggtgatgaagacaggcctggaggaagaatgcaaggacaaatagatgctgggcttgggggaaggaacccgcccttgattgagcacctactatgtgctaggcatgttgctcagtgcttcgtattcagttgagaagcagtgcctttgagaccattggtgacgtggggctcccgggtgtccaggtggcggtgctgaaatgcagatccctggttccctaggggctgcctcctcggctgggagtgtggcacagacaaggacagcactgggcaaggttcccctccctgggggtgggaagcctccaggtcttcactgggagcccctgtgggacagctctgcactcagggagtgagcgggcctccctttcttccctcccgccttggctttggtccttgaggcctagtacagtgcctggggctgagtgtggggaggatgatcagagctgtccatctgtttccctatatgggggagtccccacgctgcccatcccaggggccagaactctcttggttacagtcccagctctgccactttcagcaggtgacttaacttctctgagcctgcattcccccacccggaaatccaaaacatcctgaattctgaagctcttatcctcccaaggattcctgataacaggcattgggcgctcctaggcatcctctcctagggtgggagtgattcgtcagaacagaagcttgattgctggtaatatatcatcatcatcatgtggaattcattgaaatgagtgaatgaagaaatcacgtgtcttgaattctgaaaggcctttgagacagtcgttcaggaccttctggagaagcagcagggttgtgggccagatgtcaggatggtggtgtagctctactcctggggtagtagagctgcttaagaacttgggtccttccagccaaagaccccccaggcctctgacccccactcaaactgccctgtgctttgctcagtgatatgatggaagcctagggcctaggggatcagctggcataggaagggtgtccagatgggcaatgggccatccacagagaggggcgggggctacacagctatccacgcccagccgtcagggaatgagctgggggggtggcaccaggcagcagccttgtgcagcagccttgtgcaaaagccctggggccttggttgacctcagcgtcgtggcacagctgcctgacaagtagatggggacatgggctgctttaatagaggcagagtgccccatctggggagggagccgcgggtccctgcagactgtgtaggctgcttgctgagctttagacatcagtccttgctccagtgaatgaaagctgaggcctccacctgagcagccctgcctgccccgtgcactttgggcatcgggagtctcagtgaggttgctttaggaaaaaaaaaaagtgcttgtttaagagagttcaaaactaccaaactggatgacattctgcggctccagaatcattttgcaagcatgttcattcatgtccctgtccccctgccgggcggcccacagcctccttggagagcccagactgactcccacccttggttgtcatttatccatttgggcaaaaagaggtggtggtgctcagccaacatcagtattggttgcaataaacctactactctgtgtagttgcttaatagttactgtctttctggcgacattgtacctcatttcatccttcccaggtcccataaagtaggtatcatcatcagtttattttacacatagggacactgaggttcagagaggtccagtaatcggcccacagcttgtctgaatgaagatttgaggccaagcgatgtgagggggctagagctgcccagtgggaatggtcagcaagcgtgggctcctgtggtccagcgccatctgcaggagaagtgggatacagccaggccttagtgggtgtggctagggggtcatagtctgtccctaggcaagggagtgattatggggaccacctataatctttgcagatgagctaggcccgacacatgtcactacaaacggagtgtttttaacagtcctgtacatgtatatgggaattgcacatggcttttgttgagcacttactgtcggctacactctgagcctagagctttatcagtttttcgtttttgtttttgttttttgtttttttgagatggaatcttgttttgttgcccaggccgaagtgcagtggccaaacttggctcactgcagcctccacctcctgggttcatgcaattctcctgcctcagcctcccgagtagctgggattacaggctcgtgccaccacgcccggctaatttttgtatttttagtagagacggggttttgccatcttggccaggctggtcttgaactcctgacctcaggtgatccacccgcctcagcctcccaaagtgctgggattacaggcgtgagccaccatgcctggcaactttatccacttttatctgccaatttaatcctcactgcagccccccacccacttcagagagaggcaaggggccttagctgtcttctcttgcagtgaggggtctgtggagctgggtttgacttggttcttagccactgggctgtcagtgggctccactgcggtcccggaaagtgggtatcaagaaccctgtttgactgaatgatttgcccactgcccctcaattaaaggttgtcttgggtctagaataagagtttctgacttgaagaccagtcagcccctcttcccaagttaggggctgtagctgcctccagaaatcaagtcccaggagctgcctctgaagggacagcagaaaaggtttgcctcccttcatctggcgaagagggagaggacgcccttggccctccacccccatgaaggagagcaacaagctgtgtggctgggcagagcagagcagaggactggagtccacggtccttgattaaccttgctttgtgatcttggggaagggccttccctactctggtccccagtcaccctgtaatacagcctttgcatctgagtccccttctggcagtggctttccaagatgatgagtatttgttaagtctgtcatatgcagggtcctgagctgagttctctgggggacacaggtctctaggtggatgtgtgatgtgatcggtgggtgggtcaacgggaacactctctgttccctggaagaatctcttttcccatgatctgagctccctgacctcttgaatatccatatactgctcactccataatgttcatggctatcttggccactgtgtctagcacataatggctctcattaaggtgaaagagtgaatatgacagggtattaggagtccccaaggtcattgtcagtttgggtgggggagttaccattctgagtaggctttaaggaggaggctgcttgtcagaggaacattaagtagagtcacagggggtggagtggggaagaggaagtggcacatgtgcatcaaacctcctagacgggagaaaacttttttgtttaaactcagaaataggataaagccatcaatattgctccagaatgagctacataaattgtgaaacatgcttctttgttcttcatacctcaagattgcaaaaattgtgaaattttcatcagtgtagaaaataaaaaccaagaaaaggtacaagcccattgggataacttgcttgaccacaacccctgggagaagagaacccatccaaattagccaggtgcagccccctctcctatagctggcaagaggcagagtttgggagagctcagagctcacgcagaggtgcaggcctctgcctccatgccatgtgtcctggagagcctagtgctctcctgacctgccaccgtttggggtccctctgcattaagcattgccttgtctatgggtcatgcctctggagaagggtccctcctgcagcccctaatacctaagagatatttgtggcggctgattagaataccctgatggataattccaggctgcagaggtgagaggcatttggactccactgcctgggatggccttctggtgaggtatcatttcagctgggccttgaaggacacgcagaatcccaacaggtggccacaggggtatgtctcctgtggatatgaatggctgaggaaggaggaaaaggcagaaggagaaagataggaaaagggaaatcttgaaagctcttgaattagccaggcccggaagctgggtgtccttgggtaagtcactttacctgtctgagcaagcttcttcatttgcagcaaatgtttttctgtcattttctgtctgtgcgggtgacatgagatgacttgtacagcccatgtttgaccttgtcatgttgaagatggacagatacagcccagggcctgtgccaaacatccactgctcctcttgaacacagagagggctgccaaactgaccctttattttgtgatggatggaatgtggtatttggattatgtacattaacctcaaattaaattaatatcccacttgccacctggaattgagactggggtgggtgagcccccagaacacccccctctttagaggactccccctcctccagttttcctctccctcaagctgcctgtagtttccaagcccggcaggacacaggctgtgtcccctggggcccccacatctatcccgtcacctgtaaagggaagattggtttgacctgtgtgtattgaacgcctgtctcctctgtctctgccattagaccaggagctcttgggatgggggaggtgggggattaagctctgttttcagtcagtgcaacctgttaggtggataaatggcgtgaataaggttccccaaatcttgaagcttttaatggggatactcagcaaacccttcagcccctcgggcccctccctgagctgagcactagggatcccgtcccgcaaggtggttgtccttgctggggtacatacaacggttccggggaggggccccaccctgacatcaagctactgccgctctgggaaggaaagtcgcccggaatcggggtctaagtggccagggcactgccaggcgcaggccagccggcgcctcagccgaccacgcgcccgctctcatcggtaccaccgagggctggagagcagcgacctcgcagcggaggaaggcgctttgtcaatccccgacggggtgggggggcgtggattcctccaggtgggtgtggggggtgtgacctcgcacggggaggacaagctcggaggcggcagggaggtgagcggggcggccggccctggcggtccccgggggtctccgcccctccgcagccccgccccctcgtcccggtactccccctcgccccggcgcccggggggctcgggcagcctcggccgcggtcggcgcggctcggctcggcgtcgccaaggcaacagcggcttagggggcgggggcgacgtggcgggcggggtgggctgggccgcgctgcgcgggccgggccgtcggcgctcggtcggcgggcgggcggcgcgggccgcgagctgctggggccgagcccgagcccggcccgccctcggccgcgcggccgcccagcaagggtgcgggtcccgcgcgggtcccggcccgccgccgccgcgctaaccccgcctccccttccccctcttgtccccccgtgcgcagggcttcctcagccgccgcctcaagggctccatcaagcgcaccaagagccagcccaagctggaccgcaaccacagcttccgccacatcctgccggggttccggagcgccgccgccgccgccgcggacaatgagaggtgagcccgccgccgccgcccggtcccccgcgccgccgccccgggctgcgcccctgaggacgcggggacaaagcgcgagcccggcccggggcgagccacacggcggtggggggaccccacgccgcccgccgggaacttatggggccacctcggccggactagggggcccgaggggaggaccctgtgcctccctccggggttaggtgagtagaagagaggagagcagagggtgcccgcggcggcccgggcgaggccgggcgcgaagtcccctcgcagggaagtcctgcctcgcctgtccgaggtgggcattgtttcccgggccgtgcggtgcccgaaccggggacggaagtggggcctctgccgccaggacccatccccctgccttgggagcccctgggtatcagatacaaaaggcattttcggccgggtttggccgagaccgggcgctgcccgtggtgaggggaagggtgaacatctggaggggaggagcagggggctgggccacttagggggcacatctgctctaagtagggcgcgtgctccactgggggctggcgctagcagagcgggcagtgcccaggccctgagctgggggcacagcctgaggctggggagccagggccatctcctctccagcctaggcagctgcttctctccttccctcacctctccactctcaggggtgtctcctgctttctgtttccttctcctgggccagccgggagcaggtgtggaaattccgcggggaggtggctggtggggcagaaggggagagggaggaggaggtggttcaacctgccgggagacgctggccagggagcaggcttcagctcgcaagggcaagccatcctgtcctccagggggcactgggcggacacagcctctcagggcccaggtcctcctcgagtggtgccagccacaggcacctttccacttaggcacaggcatggtgatggattccagtgccagttagaacatgtccctgcccagcctgtggaggtgaaagtacgggcaggcaccgaggagccttttcagcattcagcccgaacgtctcagaccactggcatctgccttcgtagggctgtgtccgtgttggcactccctgtaggggaggcgtaggtagcatgaaaatgtctctcccctcccccttggttctagcgggcagaggagtacaagttacagcccaactcctgcccaaggttgagtgactgtttaactgacccctagcatcttcctggagagtaacacttccacctcccagtagaatggctagacgtttaatttccatcgtcccagagccgcgctctccagtgcatcctcaccactgcctgcagctggtttcctgccccagctgccaagcccagcctgaggcgggaccctcagcctttctctgatggccctggtgccccaggggaccaggcgtgccctggcaggaagatgcagccaggccagagctcagcgctgggtgcagtcactgcgtctttgaaaatctcgcttcccatctttgttattgtctgggcggcaggccacccggtttgctgccttcctccctccaccgggcccctgccttcggctgtcttccccaggaacatgcccttctccgcgctttccttggcgggggtcaggaccctctgcacccgcatgcgggggcttgtgtacgtaccccgttttgtgtgcatgtggtggttgtccggggagcaggagagacaacaggcagtccggcttctgagtgtgtctgctctcccgggagcaggcggcatgcatgtcatgtttacctccttacagcgggaagcctgtacctagaagccggcaagtgctggctggccaccctagccagaggtcggggcatggccaagacgacctcgtgcgggtcctgccccacttggcctcaggtcagccttgccacatgctgaaggggcgcagagtgggggttgggagtgaaactacaagcctgtttctggaaacagtaggaaacggtagcggttggagcagaatgtcactggcagcggtgtggaattgtcttattaattttctataaacaaaatatggcttggtggcctctctggcacaggaagggagcctagatttcccatggacaggcagaaagactgggtttgaaatctctctacccagccttggagctgaaataggctttcccaggactggggtctcctgatttgctgctttgcttaggaacagattcgtcggctgctgctgggatggatgggcagaaatttctctggggctgtccctggagtcatcctatttggagttcagtgagtaaaaacaactatggtgaccccgcccgccccccagctcatggccaaacctggatgagtggagcagtgcctctccctgctctgatgtggtgtggttgtgatgttgaaggctgggagggcaggatgggctgtctttggcttggtttagcagcaaggaagggttgtgtcctggctccatgggacccccactggctgccatgcctctggctggggagagggtaagtgccaagacgctagcctcagtgagtgggtgggacacgagtgggaaggacggtgggggcttctagggtgtcgagcgggagtcctggtccccatggccttcccgtgtagatgagcggcacagggcactctggggcggccacttgagttctgactttggatgaatctatctggtttatatggctgctgaagaggctttgttgaatgctgtctgcgtgctccgcaagctgctgtgttggggaggtggtttttttgcgctggaattctctcatctggaggttggaaaccagttggttctgtgctgggatttttttggctccctggaaaaggagtcggtttcaggggtggggatgccgaacctggctggttgggattgagggttgctatctggttgtgaggctggggtcaggccaggcagtgcttggttggcacagctgggctctgggggctgggggctgtaggacaggcttgagccttcggacttattcttctgaaacggcctcaggggaggttgccagctggtctccacagtctctgggtccctcagacactcatttcttcttcagaagctttggcagtaagcaccaaggacaggtgatcatttctcctgggtaacaaacacatgctgcttggagcgctttccaggtgaaaggtgtgccggcaaaagcattttcattttgcacactggaaatgctgctgcttcatttacagggctgttttaatgttggtaaaagtgatatagaggatgtggttctgtcagcccagaggataatttccaagtcattcatttatttattaatgttactgaggagctaggagggtcagttggcaatattatgctttcctcattccttctctctcctgatgctgtttctgggtgactctagccctccacacctgctgggaatatgcttcctttggcatgctacctgtctaaacttaccacagtagttactctaaagtgtctgtacccccatcaagctcttcccagtcatcctggtgcggagcttagctcataaatgcaggcagctctggggcaggtaggcaaggctgctatgtgtggagttagggatcgattcccccttccagagtatgtgtgtgctggctggcgttcccacacctgaaagttactaatggtggaattccaagtgataagggactagggaaggagatacagtacttggatgttggggatggcagcttccagggaccctcacctggacctgggtaggcaggaatcaattctgccccttgtggtgagacagtccctggaggagggagagtgaggaaggttgatgaggaacaggggaaatggaagttagggtctattttcctgctttagttgctgacagtaagtgcaggcaggactgggcacccaagtctggtgtttcttgcccttgttccctcccctactatagacagggagggcctggtcctttttttggggactagtctgtctagtgtggtgatgtcaagatgatagtgcagtttagacaattgccaggagtcatgggatgtatgtgatctttggatttgaagccaagcattcctggggcaagtcacgtaaccttttgcagcctcagtttgctcatctgcagaatgggcatcatgataatcatgttgttgaagacattaacattaatacatttagcacacttttcatagaaattttctggttcagtgctgttttcttagcatttaacactgggtcttgcacatttcttaaatgtttctaaaatttaattaaataatgtgtgaaagaggttagattaatatgtcataggttttcagttaatattggtagggttaagtcacctcgtcttggtaagcctcagttttctcatccacagtgtgggaataataagcaatcatgtggcctcatcctgaggttcaagagataatagatgttgctgtgcctggtaaggtgattcgagcttaagatgggtcattattgccttaaacttaagaaacagccattattacctagagcacaggatgttttcctagggattcctgcttacacctgggaaagcaaagctctcatgtgtgttttaataatcagttttaaaagttcattgttccatcttccgtttgggtcatacttgtttttaatcatttaggcatttaggttatgtctaggttttctttattaaaaatgacactgggatttaaatccttgaatatttatctttgcctacatttctgatttttcccaaaggataaagtcttagaaacagaattactaggtctaaaaatatgaagagtttgagatttttcttagaaaaatgtcacccaccaaaatcctgtaataattcatacccctccccagtgatttttgagagtgcttacctgtttcctcacacccttcaaaacattggatgtcatcattaaagcagtctttatcgtttggataggcagaaaaagggcatttttttgttatttgcattcatttgcttgttggtgatcgaatagtgctttcctgagtttcatggccagtggcagtgcttcttttgagacttgtctattcctgtcctttgcctgagtgttctgacaagcctcttgcaggattcttggttgccctgtttggtcttcctcagctctgagaggtcccatgtaggtggatcctacacgttaaatgagcctctgccttccaagaggtatgacaaggaattcattaattacctgtaaggaaggctcacctggctgtcctctcctcctccccctcccttcttctttccaccttcctcccgtcctctcctctccataaggaaatcaggtttaattcctaatcctatcattcataaggatgccctgtatttacacagcactttaagaggtcttctgccctgtagggtaggtaggcagtgaaagggctgctctatggccaggaaaactgaggcacacagtcaaaggcatggagctggggcctatgcagaagccaggcattggaaccagatcccctctcaactgcagcattgtacttgagccccatgggcacctttgggggcagggctgaccggcccaggagcacatgattctgagtctcatctctagagaggaaggggagagccacagaatacgacctggacgtatagaagaatcaatttattttttgctttctcatttttattactctcctttagatctggagctcccttgtgtaccttcccaagatctgagctgggcaatgtttttaggaacggtggaaattagctagtgagaatgggatcagcaaggctggggtttcaaaggctggagaagcctttctttgcacaagcatatgtttgtctgtgtacgtcttttgtatgtgttgcaagtgtgcacctgtcctcatgaagatgtgtgtacattatatgttaatgtccttatacatgtctgtgcatttaattgagttaatacaggtgaagtatttggaacagtgcctggtacatcatatggggtgagactgtataaagttgctgttttgggaggccaaatacaggcaattgcatatgattcaatctatgtgttcaggttaagtgttggctactattgttattatcgtgtgttttcttcttgggtatgcatctgccagttgtttgtacatgtctgtgtacgtataccctgttgtgcccatgtgtatagtgtgttctgtgagcactcacgtgcatacttgtgtgcatgtgtgcactttctgtctgggtgcatggacactgagctggccggtgtgtgaataagctccccaccttcttggggagaacttcccagagagcaactctttgcctcccctctcaccttcggttaccaggcagagcccaggcccaggtgccaggcctgacaggtgccatgggactgctttcattctcctccaggtagccctgcctatttccaggccccatattagaatatgcaaatcgactctttaatggaattcctttgcaaaatattacttgaaccagtaagttaattaccaggctctaattaatggctattttagaaggccacagaacaaaactggaggagatcataagagaccaaaaaggcaagagggaaaagcatccagctcccccagtcggcttggtgactccttccagggtggcagggtgtgcttagcttctctctgctctgagctgccagtccgctcccttgtgatgattggctgtaggtgagtgaatgctccccttgcacgaagaacctctggtggttctagtctcttggccatcagtgcatccatctgcgaggtgtgtccagggcagcatctgcctggggatggggtgagaatgtgtggatagcaagcctgggctgaggtggggctgcaccaacctcagagcagccgggtgacatgcccaaggcttgggctgtgggagggacagtcactggccactctgttttcccacccctccaggggcctgtgggctatcgctgcagggaagccaccccccagtcagagcctgggagcctgaggcagcttctcacagccaactctccaccaagggcccaactccctcccctccacttctctctgagttcgcggtggagtcacctgtggcccatgtgtgatgtgagagcttgcttgcacaccccttccttgggctcttggtcaggccctgcctctgtgtgactatgggcaagccgtggttcctctctgcccctccttccactcatccatcaagaggagtgattgtacctgcccacctacctcaaagggctggctggaaactcgcaggagattttagtgatggaaatgataggggagtttcccctcccagctggggcatgcctgtgttaccatcccctcctgagatagaggtcgtctctgtcctctgtgagcatgtggctgtcctcccttgtgtatacaggccatgccacctaccacctgggcatgcacacatgcacgtccttgtggaagccaccagcgtgcagcagatatcccctctgggccacaggggcgatggggtgaaaacctacgggagggagagggaaacagggtccatccccacccacaaaggttcctggcaccctgcctgagaattgggggaggggtaagaagtgatcccaaggctggaggtcaggccccatcttgagggttgcccaaggagtaagacctcccttcctcccctccctgtgttggcttaggaggcctgcgttctgcagacccctagggttatccccttgtagacctcagctgatgacagtgccttggcggtgggctgcttggaggcactaacagagcactttgcgccctgtgccagaggcatttagagttggcctgtgaataactgagtgtgcttaaattttttaagagggatggactgactggtgggcagcctgagactgtactttttagaggttgcgcaaaaggcagcctgagaaggtttttgccacctccacccttctgccgcccccctcagttttcccatctctcaggtggggctagtggtacattactgcatcagatgctctgccgagtgagttactccttagcacaatgagatcccacctccacttttcagtgggcagcccccacgggggaccagagcagcccttctccctactgtcccagttaaccatcacctcctgcctgtcgccctaacttttctggaacaagcagggcccttgttttcaggctgggcctgattgtaaaagagtgcactggggagagatagagatggcaccagggtagcatgggccctaatttgatgcgacgttgtcatgggaagttttcataccaagggcagtgaattagtgtagtgtctccctgtgcccaatgactaaggggaagttaatttcatgctctgcctttttgacattcataatcagaacgttgtattgcagctgcagattgttagcaggtgaaggatgtgtgagcctcaacaattactgtttctggcttgggaggagattgattaatagattgttcccagccccaccccctctgcttcttactcccgtttgtgctttctttccctctttccaacttcaccacatttcgtcaggaaactaagtggctatgactaaatccctactcttgtactagaaacccagggcagaggaggacctgtatgaggaggaattgcctaggacacctgataaaatgcagattcttggactccaccccagaccttctgaattataccctctgggtggggtggtcttgcttccccaaagtttgctccttttgcagaggggcaggcattgtgccccagctgtgtgctagtgacttgcctaagcacttcctgtgctgtattcttactgatttctcatagcaagagggctttttgtttcccatttcacaggtgtagaaactgaaacccgatgtgtgagtggcccaaagtcacacactggaggaaacccagtaaccaggcaagtccattccctggttgatgtcaagatcccaccagtagcatgtcatgtcctttctcattaaggctgtgatgccttttgaaataaaccctctccctcctcagagaagtagcagtagcccccttctgtgcttgcactaggctcccattgtgaaaagctcctgcacaccagtgccctgggtctcctgagggtgcttggaacagtcagggcattcatgactgatctgcattttgcagctgtggtgggtgacgctcagagaggtgaaggggcagaggcaaggggagctggaacttgtctcctaactccaggtccagtgctcagcccacctgtgccaccaaggcctgctcttctcactgacttcctggttgcaggtggggaaactgaggttcagggaagtgtacccatttacttaggattgagcgagcagcagtaatgcaattcaaggtccgccaagtcaaattccacaggacaggactagtcagcattttaggagtggatcttgtacccttggctcccgcctgagaatggaagtcttccagaccccttggaaggtctcggctcagggaagagaatgactgtctttggagagactaggccaggtggggtgggctgcactcccaactaaggaggccaggcacctgctagggtagtgggaggtgatgggggatctgcgcctgtgaggtgggcagctggaatctgaacctagggctgccttactctaaaaccccgtcccccacaccgccagttgccatggaggttaatagcaggcgttcctgagtcagtctcccagagctggtccaaggcccagctccaccaactgcttccctctgagcttgagattctctatttcagtaaagcaaaaacaaaaacagaaactagtgtctcggggcccaggattcctggcacagggctggcccagtctttcctgggctttggtttactgcattcaggtcatgaagcccctggagctgctggagaatggagccatcgtagcggggcgggggacggagatgcctttcatcctgctctgttcatggcaagctgcttctgatgctgtgatagccccacccactgccccacccactgcccgtgagtggccactcaggatgggccaggctctgtgcctggtgctttctcgtgcatttgctcagctcattcttactatagccctttgaaggatacgtgctattactgtccccattttacagagaagaaaattgagtcacagagagactgagcagcttgttgaagtcctacagctcataagtggcagagctgggtttcaaacccaggcggttggctttattatgtaaggccccctgtcaagcaccgttctacatagcctgtgctcatgtgctctgtttcacattacatgttctgtcagtgatcacactgataaaccacctggtcacttaagaagcacccgtgtggcaggcattatgcatggtatgtgcatcatctctgattttcttgactaccctcattttatccttcccccattttacaggtgaggaaactggccttagagtataaaatcacatagccaggattagcctcaggttacctttagaatctagatctctttgtatccacagccagggccctctctagtatattagctgacatggctgggcacatcctatgcgccaggccctgctctctacacttcactgagctgaactcacttcaccctcacagcagcccgtgagatatatactgttgcagtccctggttcacagccaaggaagcgtgagttgcatggccagaaatggcagagctgggattaaacccaagccgtctggctcccacatcagtgtttttaaccaccccacagtactgccctctccctatcttacaggtgaggaatttgaggttccaagaggtaaaagtcacttgccctgagtcggacagcaggtgagtggcatagacaggatttgcatccaggtctttctagaatgtttttctgtctcccaggtgagagaatgtggctgctgccaggcggtttggaagtatgtcccaagggcacccggggctctgctgggggctgctgtgggtgcccaagtcctgaggtggtaggggtggcagtggaggcaggccttaagaaagagtcatcaggatgtgagggcaggctcggctcagtgactgcccctcctatttgcaacttatcacttattctcaagcgtctttttctgtggctcccccagggttctgggctcccacacctcttttcacctgggcagagctgatgagctgtggctgcgtttggatctgttgacttataatgctgggtgaggtggggcaggtacaagaaggggtcgtggctaggctaagtggccttccatagcacttcccttcctccaaggtcagaagaacatagaggtgacttccatcactacccaggagggtgaaggcaaacagggtgatgatgatggtggccagggactcccccaccagcctctgctcaggatctgtgggaagatgggtgaagctggcgctgaaatccccagccaccccaggcagtactacagcagactcaccaagggagttgcctattgtgctgcaggccacactgccctggtgtcaccaccttctgtggactggatgtgacgtagggaagtggtagtgccagggccagatgttctgcccggagcccatccagcctgcctgaggtggtcttgctcagttgccctaggatcataaagtccacgaatttgatggttgtttatgaggatagtgaaaacctattccagagagtttcagaattaaggaaaaatggagctggcagagaacttagtcttagagtctgtacaagccaggggtgcacttgaaaggccttgttgtctttcgtacctctgctgcttattgttcagagcacccataggagtgttttcccgaactgggttccatggaacacattcttaaagatgttaatgggcgtttgcgatgagagaattccatagtccaaacaggactggggagcagtctgtccagagtttctcaaactcagtgtcagaggttcttggaggtgagacttgatgttttactccagtggggtgattgtgtgctcaaatacattttacatcctcaaattttgcttcctcattcttgggaaatcatttgtgacccaggagatgaaaggccctgagaggtcctgcaatgaagaagtcagttttgctttgtttaatccagggtttcctgtcccccaaccccaggagcagctgttaacatctgtggagcagttgtattttgcagaacattatttggtaaacattcttttgaggtgttatgtctcctcagaagcatgttttggaggaaactctggaagtgttccctgcccttagtacctgcaggagtaagccttgaatgatggcattgctggctcagcaacaggtagtgggtcatatgtatttgaaaaaagtcatcctaggtcctcaatatcattcctcaaagcagctaccagctctcctgtgtgtgggatggggcctggctctggtcagagagccctctgtggggaggtggtttgtctgggaccagcctaggcctagggtgtaggggtttattcccctttttgcaggctgggtggcgtccatgtacctggcagcttgggctctgggcctccccatccccctctagactccctctgcagaaggcagtggtcaggcagaggctgcccacagatttgcataattgcaccgtctcctgaataattaataaagctctgtccttgctgggagcaaagtctgcaccgttatggatgggtttgccatggataggtttgccggagctcttccaggggagccgatggttcctggactcctctgcttttcctggcatggagcccccagagagaggagagggcactgggttgggggctggctctggtgtgtccacatggctcccatagcatgataaagggcaggtgaggggtagtgtgtgctttcttccaggatccacacatgggttttctagcacacagatggtttaggattcttattcttcttgctttctgtggtcccactaaccctttttctctgaagtgtgatcagctgttgtggggcttagccctcttttctggcagcccaaagggagcaatgcttatgcagcaggtaagagcaatgagggccagttttcagacaagtaggggagggggaggtgtttctgcttggggcccttcttcaatccctcccagtttctgggcttgttaaagttggaggtagcctgggagtgattcctatttgagatttctaaatcccttttgatggtgtttcattgacgtgaattttccctctgacgcatggccttgtctccctttcatgctagaaaggagagtaaggggtgggcctgcccccaacatgtggttgacattggggaaagtcctagagtctcgccacgccatgagtactcttgaaaggccttgctccaaaccttctgtaggagtatttcttaaatgggttctactgaacatattcttacagatgttaatgggtacttgggatgagggaattccacagtccaaacaggtccagtgaaccaagtcagtcagtttctttaatgcatggctccttagaggctttaatgtgccagcgtgtgtctgagcccctgggagggcgtacaggatgctctgcttcccatccacaccggcactccagagtgttggcacatctccagcaatggggagctctttccacctggagcggcccctgcccttggaggacagtgccaactcttgtaaacttccccctttgtggagcttccccaggcagcatttatgtggcaccttgtcattccccacatggccctcacaccagctaggaaggtggcagggcagggattattccattttatagataaggtaactgaggcccagagcgggtaattgtctcacccaggggcacatagagttgatatttaaacccacgtctgccagctgggccttcagctctttcctcttggccaccaagaaaccatttgctccctggatagatgtcagtatgttggctggggtggggccttaggacctgttgctctgacagtgcccttcccagcttgcttggagtgtctagagggtggaggcaggagtgagtgaaagccttccttcagggtttccaagctgtggggcctggctttggagccatttgtagacaggggcctaaaaccgccagatgcctgcttatcacaccattcccgactctcacccttttccttctcctgccctcttgttgtagggtgggaatgtttgaggtgccccagaaactgggtatgcactcaactttggccagtagtggtggtgcaggggtgaaggagcagggcagggggttccagctggcttgtctttctccaggccttcctgagagttactggacaagcttggtggatggccaggggagcctggggtgaatttgttcacagcagctgggcttagaggctgcaccggggctgagatgtgacttcaggactcaggccaactgttttatatctcaaaaatcttgggttataccatacaccatgaaaggtactgcattgccacacctgacacttccattctggtcccaaagcaagccacacgggggctctctgatgaacagaatcctgctctgctgacacatggacccagatccagatccgacgccctgacttcctccatgatctgggacaagtcacctaatctctgaacctctgtctcctcatttttaaatgggcaccatgattgtggtgcctacctcccagggttttgaggtctacatgggatcatgttacatggtaatttgatcatattctgtcatcacacacatgtactcacattctcacacaccatgcttttgcttttttgtttgagatcccacaacctgccagcacatccaacccagtcttcccagggtccacctcatcatatatatagcaagagatggcccaagacacatgaagtgatgtttgtgctgacatttctcccacttagaaaatcaatattctgtggtctgcctaattgctctgttgctgctaaatgagtcattatggagggaaaatagcaaatgcattgtgagattaatgggagaaaatggttggcaaatgactttggtttgcttcggaaactctgagaaggtgttactacgtgaaatctgcagagccatgcaaggccgagtcctgagcagcagggagacaggcaggcagctattggcgctgtgagcctcccttttagggcggggcaccgattcaaatattatagaggctggactcaggagttactgagtgatgaagtcaggagccaacaatgggacaggtgctctgacaacctggtctcaaagaagaggatactcttcagttagagccagttacatgccaggcatggtgctaagctgagggatgtaatggtgagcaaaaccagccccagctcctcccctagtggaggacacaggctgaagtgcaattgtcctacaggtgactgtgtaattgcaattaaggcatgtgtcctgaaggcagtgagagcccagatctgaagggtttcatctggtgggggtggtggggagggcctccccgatgacaaaaggagtaagctgagctctcagggaagaaccttctgggcagtgggagaactcgtgcagtcctgttgggtcttataggaggggctgccacgggacttgtatggccttaaccctccagccatcctaagaagtggatatttctcgtttcacaagcgaggaaaccaggactgaaggtggttaagagacttgccagaggtcatagaacccttaaatggcagagtccagatttgaacatggggaacccatgccaaggggcatgccccgttgctccagggagctggccttggcacttgctgccctgagggtgtctctttagctagggttaaggaccttgctcctgcagggcagggggcttcatggtggttgcctgagagtctttagagagagggttataggactctagaaagggggaaccctcaacagccacagccaggcctctttgctttcttgggtctttgcttccttttaatgacagcgtgacttgggtagttttctttttctttttctttctttcttttttttttttttgagacagagtctttctcggtagcccaggctggagtggagtgcagtggcaggatctcggctcactgcaagctccgcctcccaggttcacaccattcttctgcctcagcctcccgagtagctgggactacaggcacctaccaccacacccggctaatttttttgtatttttagtacagacagggtttcactgtgttagccaggatggtgtcgatctcctgacctcgtgatctgcctgcctcggcctcccaaagtgctgggattacaggcctgagccactgcacccggccatgacttgggtagttttctgatgatcaaaatgccaggtcaactagtgactcctctttcaaaaggctctgtaaataacacacttctctccccatgaaatgggttggtttattccctgcctctaatcccagctggactgtcatcaggtagggcctatcagttgtctgcagaggtgggtggaggtatggtcacctgaaggtgcttctaaggaaggtgcttgtgagttcttgtaaacttcccaaggtttcaggagtggcagcagcagataaggagagtccaggcatttcctgtgggcattatgaaggagcaccagaggcatcccactttgtcttggtgcctggttgtagctgagcatcatagtgccatgagaacctggtaaaaagattctggagccccaccctgggagggtcagggtcacaggtctaaggggggctctggaatctgtattcctgacaagccccaggtgattctgagacccactcaagtgttgagatccccagttagcagctctggattcttccgtctctgagagggtcacaggcctccaagggatggtggtagtggagtatacttttatcttcctgggctggatgtaacactgcctgctgccagctcaggaagccaggccacactgtgcccatagggccacatgtaaggcagagcctggtgctcagctgaaccccaggtgaggcaggaacttggcctgggatgctttgctactgctattgtccggaaactgagtttcatcccaaacttaggtctgactggctgtgccctgtcccttgcgaaatataaactgcagcccttcctggcgagaggctaagtgtttatgtgggctggttgcagagcccagctctttgtcctgctcaggttccatttccaaaataattctgcttagttcttcacataaacagcagggcccttagagactggccctgagagtatagaggggatccatccccgtcccagcaccccagtgtgctgccaggagacaccagtgggcatcctggggttggtacccagtgttctgctttctgctcttgctcctgcctccttggaggccaggagccacatgcctgaggcccaggaatgtgatggggaaacaagtttcccagattggccaaagaccaagatgggagccattgcaccaaggtaggcgtggtaattcagtgccacacgtttcccatggtcaaccctgcagtcactcttcccgctaagtcaaagtgtccactttgctgttgtcaggttatttggtgaatttctgtagcctctaatgatgagtagtgagtgggaactctgtctcctttgctcctagcatctaccaggaagactgtttcagcgaaggcaagtctcatacggagctgggccttgtgcacgcatgtgtcatagcaagcactcatgaagatgggccggggtctcttgtgagcctggggcagccccgggggaatcttgccctcagagaagcacttttcaccatagattcacccctaggtgatgctatgcagtcctcatggtaggaattaccaacttccacatcggctcaggggccaggatcttctaagtggtgggacttcgggtcaagcagaattctggactctgagtggcttcctaagagttggcctgctgcttagcctgaatctcagggcaggtacagacaggatggcggtgcccacaagccctttttatccagctagctaaaagccactcattgtactagcagaagcacgtttctacacatgagaggaaacactgcatccttttcggtgcagttttacagaaaactatttaacgcgcttgctgtagctacccctggcatgtggatcctgagaatccgcccctgggcagattcactcgggtcacacacttgtttatcacacggtgtgtaattgaccttagtatgtgtgcatatggacagcataccacgtagcagtgccctgggcattctgacctgcccctcctggcgtgtttactcctctctacccatagttctggctgccgtgcctcaccctgccatgtggcaaccacatgccgggcactgagaggaggcccgggtgagagtctggtcagggtcctgccttcctgggagcattctcctttgagcaccacctccctcttctttctctcttcccctccccctccagtcctggacttcctgctgttcctggtccagggggagggcaggtaccacacagtgatgggtgtcctgcaagctgagcctgggttgttgaaactcctggcccagaagcctctagcccccagccaaggtccctgtttgggccgcgttatgacagtcttgtttccggcatgtcaggtgtgaccatgccttctgtctcgatggctttccttgctggtggtctccctgtggggctgctgtccttatgtgtcgaggtttcagaatggccaggctcttggtggggaggccctggatggacatgctggtggcccaggagagagcgacccatcctcagtccctctgcctgtgaaggcagactctcctgcctgccctggcaacagctctgcgccagcctgtctgtgtggctgccggcagccgcggctcctgactggctgccttctcccagctccctcacgccctccaaggctcactcactcactcactggctgctcgcagcagctcaggcagcgttcaggcagatggtgcaagggaggcgtgggcgggggtcctcggactctgcttgcacacccccatgtgtgggtgaggtcacgcccaagggatgtcatcaacatacgctgggatgggcttggtgccattcaagatctatctgcagggacaacaaaacccgacttcgaggtcttaacaagtccctcgggagtctccagactcgagtccttacactgcatcacccactcccctgagccaccaggccctggtctcctctcttgacccacaggacactgcaggcaaatgctgggttgaaattccagctctgccgcttgtcagctgtgactttagagaacttagctaactctgcaaaatgggggatagtatcagttcatggcattgtcaagaggaatgaatgggatttgcagctaaatgcttagcagcacctggcgaagagcaagcgcaggagatgagttaaccgggattgtgtcatggagttccccggctcgtgttgtgtcctctctctggaatgctgccttctctttcccctgtgattcctactttgatcatacctgtctttcagatcctagctccttctgcttaaagctggctctgctccccctcccccagtcctaggcggacttcaaggccttcactttgctcctcattttttgtgcctgatttctgtgcttcacttttgggtccactccacctggtagcaagggggtgcttcatgagggcactggatgggatctcttgacatatacatgtcctgccctcactggtagaacaaagcaagaatctagctccttcatagctcctcagaacctccgggcaaacctggctatggtccccttactccctgcaaagtggagcacatgaccaagcccattcgcaaggccttaggatgagaagtcatagtgatccctttacagatgggcagctgaggccaggaatgaggaggggatgtacccaaggacacgtaagaagttggagaccctggcctgctgcttctgtgcctctctgctgggggttggggaaggagtcgggccatctctcaaggaatccgggaggacttcacagaagaagtgacaggagttaaggcttgaaagaggatgggttcatcacataaccaaggcagggaagggcatttaggcagagggaaccccatgagcctagtgctcagaggatgaaaaccttactctcttcctgggacagtcattgagactgcagtgagaggtgggaaagggcctggagcatcgggagagtgagaaatcattgggaagggcaggagccagcattaaggagaggcagagatagagaaggtgagctggttagaggcttggcccagacccgtgtatgtgccagattagactgggggagggagggcccaaggataagcatccctttgtgccaggtgcttcatctcttagtgcttacagtgacctgagaggtgtgcttgttttagagatggggaaaccagatgcagagaggtttggtggcttgaccaaggtctcatgggctagtaagaggcagagccaaaatgtgaaccaccagcaacatgactctcaagtcctctggtggccaccacctgtttgggatggggtggcagctcctctcagggcaggggccctgtagtctactccccaagcaggtgtgggggccactaagagagtgtatggcccacaaggttcattgttaggtcctaggcatgtgtccaggtgcacatagacaccttcagtgaaccagattgttcaccaagcctggcaactctcttcaactaggccctattggaaaatgggtaggatgccaggcagcctacagctgggcagctccaactctggcctctgttgcccagcagccaaaaggtggggctcttgtaagacctgagcccctcaccccgtgtctgggtcctgtagcatttcggtccttacttccttgcagttctcagggtgtggcagttgtctgtgtgcctcattgagtggcagatctcctgtggaccgggcccaggcctcctctctgggcctctggcacctagcatacagcctggcccagcacaggtgcccagtaaatgtttgtaccatgaacgatacattgagcacctactgcgtgccgggtgctgtgccaggccctggaataattaacttcggcatggcactttatgattcacagagctcctcccagtccccttaggagtctgattgtctcagatcaggtatttatttccctgttttccaaacaaggaaactgaagcttaggaagaggagggctgtagcctcaggtcacatctgtcagccagggaggggcagaaccagccccagccactgcccactccctgctccctgggcagtgagcacaccctggaggctgacagctgtttctttccaacccctgcaagcaagagatagagcaccctggctggcagggaagccaggccaacagagaatccgtatcccaggaagcagggctcctgggggctgcagtaggcacctggctcatcctcagggctccacccagcaggagcaggggcctcctcttccactaccaaggacctggttgctggggacaattgtctgtgtctggggtaagtcagaggcaggagaacaaagagaacccttcctgccaatgccactctgaccttgaaaaccctgtggggtttcatttactcgaaagaaaaagggaagagttggttaccagcttcaaagaggggcagacctcctgcaggcgagcattgaggaaaccttggctttgtgagttattgctgccaaatttctccttttcagtttaacagaagtcctggggatcactgtccatgggctggggaggaatccggccaccttttttagaaggcaggaaggtgccaggatcactgctcttactttggttgggctctaggtggcacagcttctgatgtaaagatcaaataacaatagggagatctggatgcagcctgaaggctcaccccagtgtcttgctgcaggtgtgcccagctgtgggaccaggaccccaggaaggaagggcattgttctgtccctgctgtgggagtctctcagggaagcagcatagcactcaggaaatcctgggcaccgtgaagggctgtgtatttattccttattccacaaacaataagcaagtccctgctgtgtgccaggcactgagtgggatcctgggagaaggattgatgtgttgtgggtcctgccatgtcctgcctgttgtgacagtccaccactgtagtggcatctgtgtccatctggagagtacatgttctgctaaggggggcagcagcccctgcaccatggcactgggcatttggtggcaggcctttggatttataagagaagccaaaaatctagaggtttttttgtgacattttaaaatttcacatctttaaatgttggcatttgattcaaaacttaaaaatgtcaacactgtgtgggctaaacaaaacatgaatgttgaccaaatacagctcatactctttagttaaagacctttatcttaaaggttggataaaacccagatgggcagagggcaataggcaaggtcttcctggggagggggcacctggacagaggggtggtggtgggaatctgcctgagcattttcagggcagctgggaactgggaagtgaggggcggaactgatggggccccgcccagtcatggaatccttgcatgccctggacgtgcagatgtgctgcaggcctgacccaggctgccctgagagcctccagctgtgtccatccctccagtcagcagcgtttacccaacaccgtcacataaatgaggctttggccaggcaggagctcaaggaagaagggtcatgagtatttaagagaaacctccaggacacacgatcctcatctccaggaaagctatggaatgggggctgtcgatctctccgttgtccatgcatgcatgtgacctcccctgccatttgcatttgctctcctgcagctccttcaggttctgggctgggccaggagggctttcgcaagaacacctaaaaacccttggaaaggggctcttcccttctcctcttcctgttcctcccctgcaggagtcctgcattgttcagagggtttgaacggctctggccaaagcctgtttgggtgtcttcctgttcggggcctgcagttatgactcctccctttttctcagtttctccccgtctgccactccccccatgatccatatttgagtttcttctaaatgatcacctgcagaaatggtccttcagattgtcccagagatttgcccaggaaactttcattgagcccctgctgtatgcagggccttgggccagagaggggactgaaacccagggctcccactgactggtagagtagacagccacacagacagccagtgggtttgaagaagaaactcaagtgtggatcatagggggagtgacagacagggggaagaaacagaaaaagggaagttatgactgcaggcctacctgggaggctgaggcaggagtatcctttgagcccaggagtttgagtctagcctgggcaatataatgagactatgtttcaaaacaagataagttaaaaaaattgcaagtatagagtaccaaattccaggcactataaagcaaaaagtaacaaaacttctatgccactcccaccatagaatctcttactccaccaaaagccacggtggactgttggtcggggactttttctgcagacttttttctgtggccaatgaaatgatcttatccacgtccctgtgcctggaacaggccacccagcatgctcctgcttccttggcctgcagaaggactgagggagcctagctgccatggcccagagccctctctcccagcacccacagcctttagtcccatagctatggtgctgggtggccctccatggacggagtctgtggctctggaaggaagagggcatggtcttttcccagcagtgccacacagactcaggccgtgggctgcctcagccagcagagagggaggcaacaagcaggctggctggctgaggacttcgagagcacacagggctcccccaagggatcctcgggattgagttatttctgtttttgctcacctgtgcctggccctggggacagagacaggaatcagctgcagtccctgcctccctggaggagctcccagtcaggtgggagaggtgcctgccacccctgatgaaactgtctctacctcaggttctccctgctgctcagaacaagggacagccaggaaccaggtccagggaggagtgtggtctgggctcaggggagccctggaggaagtggattgtaagctaagattgggaggaactctccccaccctggtttcacctgatgggtcttgcagcacctcctgctcagtaagcaaagaactggatgggaaagaactgacatctgtgcaatgcagacacttggagctgttgtttcatttagagtacagtgttttcccctagaggccctgtgtggatgaagacacagagctggttgaggattgggcccagggggtagggcggagaggagggtgcatggtgaagatttgtctacttaggctggtgagcccactcggggtggagcactggcttaaggcaccttggccctgcccactgctgctgggggaccttgatcaaggtacttcatcatcagtcaaatggggcagagagccctgcccacctcccagggcttctctgagagtctgcctgacagtctttctgccttgggagcagcagagcctgggcccatgttggggatgatgaggatgttgatggtaacgaggatagtgacagggacaacatgggggattgtttactgaggattccctcatgctggcgcttgaggtgacacaccctcactgtgtgctgtgtgccctgccgtcatggctccccactggaccctgcaccgagccctagacttgctcccctttcagtcagttctctgcccaggactcacttgttatgactcaggttccttcctgtggaccctgaatggggagcacctgactacctttccagttgcacttcccccacccctccccgttccctgccccacgagtgctccagcatacatctttgtccttgttccctcttcttctcttcctggaacattctttgttcagatacctgtgtggcttgctgccccacttcattcaagtgtgaatccaaccacccggtcaaacacagccccctcccatcctctagccaggacctggctctgcatttgtctctagctgttgagttcacctgatgttgttacatacttcgtgtacttttcccacactctagactgtacgccacatgcaagtagaacatttatgtcttgtaccctgatgtgtctctggcacctagaatcgggcctgacagaaagttggtgaatgaacaaacaaacatttaattgtaccccataatgtggacacattgctgtctacattttacagatggggaaactagactcaaagaagaggtggattgactagcccaatgtcatacagctgcagcgggacagaaccaggattttagcccagtgtctgtggcctctgagccctgtctcagccagtagacactcccacctccccagaatctaggatggacaggaatgggagggggcccaaaaaggtgggtaggattttaccctggggattgaggggtgaggccaaggagggggtgaaccatgagggtctgagagggccaggggcaggtcggggacttcagtgagggtcaggacagggaacccttgcaagacagtctctgaggagagcacccccggcaccagccactcccaaagaccagccgcctccaggcttcttgtgctggctttggttcctggcacgatttctgtttcccagaggagctcaggcctggcccggcttcccagggtggagaaacacatggtgagtgagtgtgtgtgcgcgcgtgtgtatgtgtgtgtgtgtccagccttgctgtttgcgttgtcgtcacgtcttcttaatcagcctatttctgggagcgatgacttcatctcctgtgattctcgacacagccattgtcaggcgtccatggaaagattgggcctggcagtgtccatattcccctaacgagccaggttgggagagccaattggcgggccctggtctgacctggctcgggggcttatggtcaggtctatctccaagagactccactgcccagggtcacccttagatttggcctctttgaccctggggtacccagtgcagcaaattccagccattgtttcctgtgtgcttcctctgtgtacgctctgctgtgggcagggggtaggggacagtcacgccaatctctgccctcaagggctcctgctgtctgacaatgcagatgagtcaacagacctcaccttagagggtctgtgcgtgaacagagaagggagtgaggactctaccagcgctcaaggaaggctccactgagttggtggttgggccacagggtgaaggtgaaggttcccttgagggagggaaagggcttttgggcatgccaggtagttgggtatcactgggcacggggcggctatgtgttgggcctggagagtgcaaggaatagaggggaaggtagcaggaaggcagcagggtatggacttgatcctgaaagtagctgggaaggattttaagaagagatgggacctagatagatcagcgattttagaagcaagtccttggctgtgtgtaagggtaggtgtggaaaggtgtgacactgggaaatatatacagtatttggtttcttggcacacgactcctgaaatccttagattctttaaagtgatgtctacttatttgctaatgagttgactgatggctggcagcccctaggtggcttcagaaaggggtcacagaaaagaccaaggcaggattagagggttagaactttcagcccaccccacagcccctggggcagggagagaggctgaaggttaagttagtcgccaatggctagtgctttaatcaatcatgcctatgaaatgaagcttttataaaaacccaaaaggacaaagcttggggagctttcagatagctgaatgcttggaggttcctggagggttcctagggagggcatggaagctccacgcccctgcccacatacctctccctatgcatcttttcattggtatccctttataataaactggcaaacagaagtaaatatttccctgagttctgtgagctgttgcagcaaattaatcaaacccaaagaggggtttatgggaaacccagttgatagccagtcggtgggaagcactggtaaaccaacacggggcttgcaattggcatctgaaggatggggggatagtcttggggactgagccctcaacctgtggatctgatgctatctccaggtagataatgtcaaaatggaacaaaattagaagacatctgggctggtgtctgctgcccaactaatcgcctgcttggtgtgtggggacaacccctcccgcccccaccacatctggtgttggaagtattctgctttgtgagagtataaaaggaaaggggagaaactgagttgggttttttctacagaaggtgtctgggacagggaggaagaagctggcgactgagggctcagccctgtattcccctttatcttcaaggggaagggtctctttccccaccctactccctcatactgtacttcaggaactggtgccaaggccagctgagctcagccaactgccaggagctcagttccccaccctggaatgctggtgggctggggatgggaggtggagaggagtagggatgtggggtggtctctcaaaaatattgtgctggacttactgcaggcttatgtatagctttgcctggaggcagggggacagttgaatgagtgccagcaggataaagcactctgaggggtgataccttgtgtcctgctcttggcctggacactcgttaccccctcacctccattccccatctggagatccctcaagccccaccttgaagcagagacactgatgtaacagttcaggctcctgagctgcactgcccgcggtgaagctgcttcccagcgttgtggcctctagcaggtgacttgctctgtagtgagttttagtttccctctctgtcaaatggggacaaaaagtgtaaccatttcctaagatacttgtgaggattaacatatgttttaagagggaggcttagcagagtgcctacacatagaggcgccagcgtgccttagcatggcagtgggggtgtggcaagggtgagggcaactgtcttcaccataattgccaaggctcccttaggattcaaaaagccagggatcagaggagtgaggaggtgtgatgggaaggcccaacaggagagcctgtttggcggagcaagaaagagactgggccctcctctccaccactctgtgacctcatctctctgagcctcaatttcttggcccaaagaaatggtgagaaaaggaatgttgggggcccccactgcaggggcaggtgaggagctaatgtatctgttaacacttgtgtatttccttttccctcaaagccgagaatcagctgcttgcctctctcttgggcaggcatccagcagggaaatgctttgaaggaagccttcccaagctgagggtagccaggctctcccacctccatctccttctcccacacagggctgtctgccttctcccttgtccctgagccaccacccatcatcctttgcatgccttcattgttccagctgctcagtgttgtctttttttgtaagaaaacagtccagttcagcaaacatttcataagcacctgttgtctgcctgggtcttttttgggctcagggcatacaggggatggttaaagtaccaacccagctattataggggagaatattatggaattgttttgaaagatctgaatgcaaaagcagcgatcccagggcaggaggccctgggttctaggcccttgttctcctttcttcccttgggaccttgggcaactcatggtacttctctgaatctcagtttcttcaactcaaaacccaggtcagtctgttgatgcccctggttctaagaggcatcctgtgatcagttttggagtaacaccctgtgggctcatcagttagagaggtctgtgggaactgcagtttcaggccatagtgagaacagcagaccccagagggaggagtctgatccaagtttgagtcccgttccactgcagcttttgctagttgcgtgaatttgggcccgttccttaactcaaagactgggttttctcagatgtaaggtaggcattgtgatatgcctgccaatagggaactcacgggtcttattaatgctactgagatcctgttctcagatacagggcctgctccatgccaagaatacatacccaaccctccagagctccttgtatcagagaggggcattagtgcccaacttaagaggagccagtgagggtggggaggcctgcagctggcccaggagctctagaatgactgcaggtgggctgggcaggggcttcttgatttcaacatgcactagtgtggaattctatctagctttatgaagaaaatgtttgctaatgttattaatagtgtaaatgagatttggggagggggggacagccaggggaaggggttatttaaacacacttcaaagaacacccttctccagtatttaagcagcatcatttgcatatgtaataattgtgctaattataggtggcctcatctgttaacgacaagtttgcctggttgagttacattattgtaatcacccaatcataattctctggcatgcttttcactaaagataacaacaacaatagtaataatgcctgtcattttttagtcttttgctctgtgccaggcttcctcccaggtacttgacagtcatcagctcatttaatcttcacaacacctctgtgtcccaaagattcttatctcctgtgtacagaggatgaaactgaagtgcagagaggttaggtaacctccctgggctcacacagccaagagccaagggggaaatgccagctcacaggctctttccactggctagcactacttctctggggacacttgacatgtgttctcaccctttatctctaagccttctctttctcatttgctcctctcagaaacccccattttaccgaagaggaagctgagaccctaggagagaatttggggctgggcaggaggtgagcccaggtccccttaactttatgacaaaaccagccccagcatacccacctgccttcctgcagtaagggatggagggcagcagctcctccatgttctcctctgaagtcttgaaggagtccagccttgaggaggagggtgctccttacctctgctatcaagcggggtaggcctggcctctccatcaaagaaattataagtaaacaggtgggaggactctagcacaccattaattgctttacataggttgtcattaaatcagagatagtatatggatggctggtggccagatgtagcccacaaacaggtctcatttggcccgatggggtggaaagtttttgttttgtttgtttgtttaaaatcattcaccaacactagaacatttaccttaaacattcacctgaaaatctaggtttctggcttctattttaagacagatgtggcttcagtgggcctatattcctatagggcaaataattggtttcttcagttcacctcagactccttttctccctggaaggctcctcccagcaaccttgggaggtgtgtgggtgtgtgtggggttatagtgttcccattctgcagataaggagcctggggcccagaggggaccagctgggccactccacaaagctgttggtaaggtcaggacttgaacctccatcctcatctccacgctttgtggttctcactccacctcgctgcctcccagccatgtccaacccccactggccgccaaggaaagaaagaaacttttcacaggcctaatgactcaaaaataagcaacagtaagcctgaagaactgttcctatctccctcctctccctttccacccttcccgaggccagaagggacatgggaaacctattcatttaaactcaattattttctcgaagacagaacagaactgaattgggtcaacggctatatttgctgtgctcagctgttttcctgcaacagcatcacccgccgggtctgttgctgggccctgcactgccaggctcaccaattatagctccatattggtagccattccttgggaagcttggctcaggaagagaggagtcagtgaatagaacctatcaccctctcctttttcgcccagcaggctgcaggggcagggtccctgggccagtgtgggtccaggctccgtaactgtgtggtcagcacctccagggacctaggcttcaggtattagacatttaatgtccaacacctatctgtaggggaggtgcatctgcagcagagtttctgcagatgaggaaactaaggcttagagaaatgaagtgcttgtgggagaagcagaccttagagtcaggcacagctggcactttctagctgtgtgactgggagcaaagaacctgactgccttgctcctctgatcccacctgtaaaggaggcataatttgacatacctcacagggctgggctgtcctgttgtagatgggttgcagtgtacatgccagcagcctgcccagggttaaccctcctggcaatgagaagtgtgcaccatgtgccaggcacagaagttggtgggggcacagaagttgttggggacacagatctctgaagaaggatatgcttggacatcgttctctccagatacctttcctgattccctgctcccaaactggaaatgctcctgcagtctctctaggtcccctgttggtccaggccctgccctggacacttttcaccacatcttctgggcctacagcctgttatatatatttttttgtttggtcctaatatttgtgtaccttcccctctctactaaactgccagtttcctgaggacagaccgggtgtcttgttcacctgtttggctcctggtgtcacttccttcccagctgggtggccttggactggttgtttaacccggtgcacctgttttcacatctgtaaaatgggaacagtgatctctctccctctggcacatgtcacggcaaggaggttaatatcacacatggcagcactgtgccagatggctgacggaatggagtctagagaaacattgggaggaaaccaaagcagaggctgcccctctgccctccttgaagtagggagtatctaaggaggcgaggcatagtggttataaatgctgtcttgttatagaattgctgtctggttacatggggaagtgggaacagagtggtggccagtgggcctttccttgtctcctccagcttcttgctgcagagtgctgggcttgccccaagaatggactgctctggcctcacggtcatctcagattgcccagtggggctggggctggggctggggctggggctggttgggacctacccacaaccactgacctccaggtgcccgggttacagtacctggcattagatctcttcttttggggtctgggtgtagagcaggatctccctgcactaccccacgatattattgctgatctcagggttggggagtgtttagggaggcttgagttccctgacctttcaggaagcatgcatgtgaacttaggcctcggacctcgtgtagacatggtgtggtgatggctgggccctactctggtggggtggacgcaggacttggggactaagcagcaagtgacctagccacagacacagaaatggctctggtgggagcccagagtggcactggactctctggggggccagggctgaggggactgcccaggttgatcccggcgtcttgtacaatagaaccagcagtcacaggctcataaactgtaaccgtcctctttccgttgcctcttggtagcattcagcccctggcacactatgctgggtgttgcctagtacttggcactgtgacaaccaagaaagaaaaatgctgaccatgtctcactgcttgttcgagtaaatttactctatattttttagagatgtcgcatgggtgggaatttactcccactaaatgttttgatggaaacattacatttttggagtgaacatgtgtcaacatcactgtggagaaaaggttccaggattctctgccagccaaagtcatcaccataagacactggttgggggcctggcaggcggaggtgatgcgaccaggctggtagtggggcagaggtagccagatgggtaggagtctgcctggctggtctggagggagaaggggatctgagctgggggaactgaataggtggtgaggaggaagggagtagggaggctgtgggctgatgacatacattaaccacccacacagctcaaaactaggtgagtggggagcttgaggggcaggaacagcgagcagaggctctgaagtgttgaacactggcagctcagacccgagggacaggctggggccagattgttgagggtcctagaatcccagctcccaccagtaactagcgatgtgagcttgggcaacttttccaacctttctgtgcttctgcttcatttttagtaaaatgtagcatggatagccacagcttatggctctttggagaattaaaggagataatgtctgtaaaatacctagcgctgggcctggcacatagcaggtgccaggacacatttgctgtttgttggtgatgataaagccacacaagtatagatgtactcacataaattaacagctggtgcactgaaactacttcctgagttggccctcaatctaataccaagtttgttttctcaccttcagctaagtacaactggtctcttcagaagcccttgtggtctcttgtaccttgtggtacaactgtggtctcttcagaagcccttattcatgaacagccaggccctgggctgactttgctacagggcatccgtctctggccctgtacctgtttctgtcctacagacggatcctggggcagttggtgggttttagcagcaccctcctttagaaaaagcctctgtcgtctgctcagtctctagaaagaagagatgtctcctctcccaggatgcatgcatctctccccacgggatgtacaggcgttgcctggaggtattccttgacagtcgtggcccagactctcttgtcattcaaagaaatgggaagctttttgaggtgggagggtttcagactcccccagagagcctagcccagttgctgaggacatcttcagatctgaaagaagataagacaggagcatcctgagctctggggagaagacggcctgcagtgtgtgtttctccatcactcacgtatggaatcccttaggccctgagaaccagagatgaacagaccccaaggaaggcctggcagggcaggcagcagtagccaggagaagggagtcagaccaggaattcaggcagagaaagggagagattgtgcactttcctgtgcccggggccactgggaaggcttccctcaggtgggggcagttgagctgggccttgaaaggtgaatgaaaattagaaatgggggcaggaggggagcctcgtggaagcaagtgtgtgactgtgagaaaggcggggcatgcactgggaagagtaaaaaaggaggcgggctttgtgactgttccctgtgataagctccaggtataaaggtgaggagtgtgcagggacaggtaggacctactgatgggcgaggcccaaggctctggacttgttctgtggccacaggagatgctgaaaccaggagtgactggatcagggcagcttctgaaattcccccagctacacgtggccaagaatggtcactgtgtactctgtacttttatgtgttactaaagatgttgctgggccgggcgcggtggctcacgcctgtaatcccagcactttgggaggccgaggcgggtggatcacgaggtcaggagatcgagaccatcctggctaacaaggtgaaaccccgtctctactaaaaatacaaaaaattagccgggcgcggtggcgggcgcctgtagtcccagctactcgggaggctgaggcaggagaatggcgtgaacccaggaagcggagcttgcagtgagccgagattgcgccattgcagtccgcagtccggcctgggcaacagagcgagactccgtctcaaaaaaaaaaaaaaaaaagatgttgctgaaaggagcctgcaagcggttatgcagacttctgagcaggggctaggaaggagggcacagaggaagcaacagcagacagctggtgagggtgggagacccactggagatggacatattctgaccctcagatgcaggctcatttcttgttagctcgtgactccttactatgagagctgtcatgcaaaggaaaaggccctgttatggggccctgttttcttataacaagatattataacagtggggatgactcaacaaggggatgcttcttgcctgagggaaatctaggaaggcttccaggaggaaggactattcagattgaggagggaaatgagggggctagtaaaaggtgcaaaaacagttgtctaggggtgaggcacactttcagatgtagttgggtcaacttgagcaaatgacttagctattccagacttgatttcatctataaagtggtcacagtatctgccttgcctgtttgttgccatgatcatgaaatcagtgggagcagacctggcttggagcctgcaccctggagggaggtggtgctcagaggatgcactctgctttcgccttccttgttggtttggctgctctggagccaaagggggcttctctggccccaggacctctctgagactctatcttcacctctcccctgctaggaaattttattaagacattggataaacagatgacagctctgagggaaaacttctcagaaggaaggggacaggacactaagtgctcttctggctgggagccttttaggcagtagggggagctgggtagctcttggggctttggtggtgtggactgatgcaaatgtgggcagacggggtggtgttggatcgcctggcctgtgtgcacggcagagctgagcctggagcctagggcccagcaggggatggaatgagtcagggactttccaggttgggggctgctgctggggacacagtaaaacctcttcaccagtcctgcaataaccccagacagtatcctgcctgcctgtacacagtaggtgcctgacacagtctgcagcttagtaggagctcagtagttgtttgctaaaacagtggcgcaggctgcaactgccaaggactgacctggggtctgtgatgccttagggtggaggatgcgaggagctgggcaggacctaggtgggactccagggtgtggctcttgttctcccactggcttctgttcatatttacatcgggaggctgtgcagcctcgggttcctggcctcagctggattagcacctcttgctggtggctgtaagggaaggaggtgtgacggtatgataccctgcatgtggtagagactcagtaagtggataccattgcggtggcttctctggtgggatgggaaaaagggtgaccccaggcaaaaatacctggttggctgggtgtgcctttcccctaggggtttttgtttccgtgtttaaatgacccaaggatgaatctccaggccagcaggtggggcaggggtttgtctgcccccaggcttctgggcgcaatcgggaacctgggcagctcacacagctcaccagcctgtctcctccttccctgcacccgacctttcccttctgtcctgccggactagccgggtgctttccagaagagaaaacccgggactgctgcctgggaacccagtgcccttctcagcttaggctgtctagacccaagtcggggtggggagtcgggttaggggatcatggtagacaaacccctggccttgtctggacctcagttgtgttcacttgttaaaatgttggaatggaaatgtggggaagggagagcgtttgccttggttgggtctctgggctgcgctggtctaagcccgacgaacccggggtggggccagcgggccaaactggaatgcgccgcgagagccgggccgcgggcaagtgaggggctggcggggccggtggggacccagactcgcacgaaggtggggaaggagttgcaaggcagagacccccgaacccctgctccagggcctgcgcgtcccgcccgcccggcgtgccgaagcgcagcggcgggtcgctagcgggaagtggctgcagctggaggcagctggccgcggaatgtcacccgctgccgggcctgggaagggctgggcctactgctgtggggtggggggcgggtgggagggcccggagggctggggctggggcgggccgcttccgggctggagagggtttggggcgtggcgcagcccgacgttagtccggaatgctctgggagcagcgctcgggggaggttaccttggcgcgcccccaaatcttttggttcccccgctcctgccttccactgctctggctgacctggctcagaccagcttgaaaaatgcattcattcattcagtacatctgtcgagtgtctactctgtgccaggctctggttcgaggtgtgctgggcttaccggggcgtgcaggtccctgttctcgtggaccggacattttcatgataggtaaaagacagaaacaaacaagatgacttcagggtagttctgtggagaaaatgaagcagggtgataacttgggaggtgggagttgcccctttagctagagagatcagggaaggcctcttcctgggacgggactttgggtctgagaccggaatgaggaggaaccagccttgcccacggaatggcaaatacaaaggcccagaggcggggcttggggcaggatatgaccttgggcggagtcagtatgttaggggaggagcctgtagggacggctcctccctctttcttgacccagacctctgtgctctggcctgcaccctgcccagaggccccagagggcgacttgccatggctggaagcgatagtttgctttcaggagtgtttctcgtcttcttggacctggaggttgtgccatgtggttacctgcatggaagacggtaattttccacttgtttcctgaaggacacggaaacctttagatgttgtcatcactgtgtttatttaagtcatttttgaaatttcagcttggaagacacagattcagcacgtgcctttcgggaaggggaagccctcctaggctcacctcttagatgccggcccggccgagaggccccctaatctgtccagaagagctgcctgggtgagcaccacccttgggaatgggcctctgtggccttggacttcttagtgacaacttcggcaagatcctgggccgggccggaggggctgctcactggagacctggccatcttcggaagccagatctggctccagagcctcgggggttgcaagtgcccagaaccaggtcagcagagaggcctgcgctcccaccacaaaggtctgtttgaagtcctgtgggagggaggacagacaccacaaggaaacttcctccccggtgggtgggtctccagccaggtatggggtcagacaggctttggtcgggctggagggtgaggagctgtttctccaatgaggcctggtcccaggactgagtcctcagtgggcagggcttgttggtgtgctgtgaaagtgcaaggcttgggggactgaatgggggactcccttggacatgggaggaagagtgaaggtgggggctggggttgctaaactggttcctcctccagggaagcaagccctgccctcctggagcttccaacctggaggtggggaggtgggctggggggaagctttagggcacagctcagagaaggccaagcaggcaaggttgtggggcacctggaaggtgggtgtccagcggcctggctgctgacctaggctcagggaaccagcatttggtgggtgagctgtgaggaacgggccttgaccctaggctgcagggctaatgagggcctttagccagaggctcccagcacaggtgagggggaaactgccggtgcccctgtgccctcgcgctctcccagccctgcctctctgagacagatttaataatccatgtctgtctctctctctctcagttagtattgcaggagggaagctttacttctaaaacttttattgatccagacactaataaaagtaaagggtttttttttcttctttcctgctagagcaaagaacatcagacatcagagccctaaaacacaaatgtgttttcctcctccctagatctgggagggagttgtgggttggccttgttcagatctagcctcttcaagaagcctccctaacttctcaggcctgcagtcatccacctgttccagagcagttaaacgaaactgccacatgtgcctctgtctgaccccagaaggctgggctgtcacagaagctttccttcccacctgaggtccccagggttagggagagacgccatgggaggcattcaagacctggctcttgatttcttgtgtctctcagggtttggggtttggttctttggctgctctggtctttgtttttgcatcttgatttcatcaggacttactgagctcttatactgtgtcagaccctctcttaagacacagaaatacaacacgtagagcttggccacacacagcttaccttgtgatgggagaggcagataagaaataagcagagaaacaaagtgattctgctttgggaaacatagtgaagttcccctactgaaatgtgagtcagggaatttctgtctgctttgttcagcacctgtgttcccagtgcctaaatagtgcttggcacatagtttgcacttaaatatttgctagctgcatgagcaagatgctatgaaggaaacaagccaagtgttccactagggagtaatgggggcagggcaggacctgttgtagatggagcagtcagggaaggattgagttgcagaagatgccagaagcctgccagtttgctgttagagtgtgctggagcaagaactcctagcctagggagcagcaagtacaaagtccttgagcaggaaacagagactttggtgtgtgtggtggggggcgttgggtgttgctggatgaggtcagagagtaggtaggtcatgactgccaatgtctttcacctgggtagcagttcagatttattcagtgcagtggggagtaattgaaggcttttaaggtgaggagttcagtaatctgatttgcatttctgaagggtccctctgactcccctggtaggggtaaggggaagcccagtggttggggaggctgcccggacagcaggctgcctggggaagatggagaggagtaaacaggtatgagggatttcagagggggtagcagcaggatttgtgttggattggattccaaaggccagggaaaggaagggctcctggctttgctactgaggctccacgctggacatttcagacgtgaagctccgagaggtgtcccagaggcgctgtcaggcaagcatggagacacatgggtccggagctcagaggaggatagggctggggatgcacttaggagtcgtgagcatgctggaggtatttagagctatgggagtggaaagaatcaccaaaggaaagtgttgtgctaaggaagtgtctccgaaacagccctgaggagctccagcactgggaggaaaggaggtgaggtgctagcagcctgtgagaacagaggaaagctggagcagggtggcctgggttcacggggtagtaaggcacagaaactggttgactttggcaacatgaaggcctttggtgtcctcaaggagacccagtggggtcggaacagacaggtgtgttgagtaggaaaaggaggtgagaaggtggcggggacagcagtgagcaaagaagtgcgtgaggacccagctggcccaggatgttgaggaggggagggccagggaggggcctgaatgttctctgtccacagcgtaggtttaccagcagcagctgacccagtggatctcagcctggagattctgattcaggagcgccgataggccccccacagtgatctttcccagctctctgagccctctccacccactctctggaaggcttgctcactgtgccctgtcacgtttttggactgaatgctgagtctgttgaccctgtgttccccccgtcagcccctttccttacaccagtctctctgggtccacggcccctaaataagagtatcctggagcctggcttacctcaagtgtctttcccagagcagagctagacttcctttacaccaagggtatttctctggaaggctcctttatgtgtttggcttctggagaagtttgagatgttttacacaatattttggtggccaggagctctaaccctcacccccaacaaccctgccccaagactttttgctggctctggggagggttcagaatgcatcggcttgagggtgcagggttggcatacacagctggagataacataatgtctgctagacgcctggtgggtttcagtgtctgttgaatgaatggcactcagatatttgagtttggggttcccagttgctttgttaaatgcttttcctggttaaccagtgtttttacatctgttatctgcaggggatagtgtattacctcattttatacatgaggaaactgagactcaggaaagtaaaaggatttgtccagggttccacagttgctaaatgacacgaccagaattggagcctgggcctgcaaaacccccaaattgggcctcttcttactgactaatcctgggggtgaggtagtaagggtggaggttaaggcacccaggtctcctactacctctcaagaatagtggccagatgttctgccagggctccaaggcattccttctgcctcccacccacctgtttcctctgatgctcgacaccccctcctctccccacatgcgcaccagatgcattcggctccaggaagataggatgaggcaagccttgaaccttgtcaaaccttggggatgcttgcggcaaagcctgtagcttttggggaggctgtttctgcaacaggcgtgtagggtggccctatggctgatgcagaactccccataggtaaggtgagctcagccggatcacatgccatgaccacacgtgagcatggaagacaaacccagagaggtctggaggcagggcccctcccggagaggcaaagccacttatgctgcctcctgacagcctgtgtggctttaggctctcgcttccctcctgctctgcccctcctactcacccagcagacttgcttagtctgggcttgggtagccgagacaggttgttttcaggcctcaaaggatttgggccacagcccagcctttctcagtgtttctcaccttctgtccttgtctccttatgggacggagcaggcatctggaaggtggcagaggggtgatcctgcctggaaatcactgagggtccttttatagaaagaaacaggctgagagaaagaaatgacttggccacagtcactacccaagaggctagtttcctgtttgtgcctccagctatcctggggcagcttccttcaccccagctgaaagcaggcttttgttacgcgctcactctcagcaaggctttgttctgtatcctctcggcaatcctatgaggtaaataatattatgtccatttttgaggaggaaacagagaggcctagggaggtgacttaacctgtccaagaccacacaggttacaagtggcagagtccgggtttgaacatagcctggcttcagagctcattttctttaccatcaggctacacattctgaaacttatttggcttccaggcatcacagaaacagagtgagggtgctaaatccttgaatgactcagcccctgtggagttggacctgaagacgcctcctggccttggcttttctgaccaaagatagccacactgggcagggcacggtggctcatgcctataatcccagcactttgggaggccaaggtgggtggatcacctgaggtcaggaatttgaaaccagcctgaccaacatggtgaaaccccgtctctactaaaaaaatacaaaattagccaggtgtggtggcccatgcctgtaatcctagctactcgggaggctgaggcaagacaatcacttgaacccgggaggcagaggttgtagtgagctgagattgcgccgttgcactccagcctgggcaacaagtgtgaaactccatctcaaaaaaagaagatagccacacagcacctactgtgggcccagccactccaggtgccagaatggcccacgcttctctgagggtgccgtagaccaggtgctgagacgcagacagtccagtctctcttcccttcctctccccatcccactcctattccagtaactaggcaggccctgcccacccttgccccaggagaagctccactcttgtggacagtggaagggcctcggccagcttgcctgagtcctgggcttggaaggacggttgcccccatctgccttggttccctgcacctgccttttcttccccgcatcctccctctgactgcccgcttttctctgctttcaccttcccctagtgttcctcttctttcgtgttgtgtcagaagccatgatttccagtcttctcatctggaagatgaaggaaaagatagacccgaccccacagggttctgaggctcaaactgaaagcctggtggtggggcacctgtgacaggtgagactcctcatcttgcccccttctttcttcatcatgaagaagagacactggaggatgtggagcagttggggcctgtggtccaggtgggatggagcagtcagggcctcgtggagggagcaggtgggaggaatactctggctgggatggacctcacggggtgtggcccagctttgcagctgacttgcatgaagtcctggcgagctggggagcccttgcaccctcagcttcctcatctgaaagatggggcaatggtaatgcctgtctgtggagtggtgaggaacaaatgagactgggccacaaagtacccagtgctgtgcccagcacatagtgcccaaagagggctgctatctcatctcttattcctgagatttagcttccttgttttgtttttgagctctttgggaccttcgtggactttgaatttttactattgttcattgtgtctaaaatcttcctcagaagccgagggcctctaacctgatcatgaattttggagtttcgttttttgttttttttttctttcctgtttcctgtataggaaaaagggacctgtacctttaagaccccagcaggcccaagtaggacactggccctttaaaagcacattacagagagttggaacatagcctttgttgaactagccatgattagtcccagcggacagggctggagtggcatgtctgggatcagggcggggctaggctggccggggccagccaggagcagcggacagcaggaaggctcgcccggccactcggcttcccgagcctggtggctatgctgagggatggtgagtggcctgagcggagcttagaataagagaggctgggaaagccaggagggaggcagccccagagcccagggagacctgaatgagctgggcggcagcagacaccctcagtgagtgactgtcacaggagctggtcccaggagggactccggagcaccctgcccctctacgcagacatccactgccggcccagaatgtagaaacggttaggagggacctgtgaaaaagcgggacaccaagaagagcactgttgctgtttttagtttttaaaataagaggaagcccagtgtgagttgctctgtcccccaggcgcggtgtcccctgtggtgtgctccgttgagaactgggaaatgccagggactgctgacaagttttctgagctgaggagcttggcctttgctctgagtggccgaacctttggctggctgggtggggctgcactggggtttgggggccatggtatctctgccccagctcctcagcagaactttgttttttcttctcccttcctgcttccactccctagtccatggggcccaggcccactgggtggggtggaggcgggtgggagactgggaagactgtgtctgggccaggagcgtgttttggctctgcttgaatatttgaaacagttgtcagaagccagatcactttggtgtggtagcgtctttactgggcaagtacccatttctgaaaaaaagtcagaggaaggattgggcttgttacagccaagtctcagtgcaggttggtcctaaccgccttcattgccacggctgggggcggatgagactgcctgccagtaggtgtcctcactgttttacagacagccacccaggaggtgacaaaggcagggctcagtacatttctggtgacccaggcttcctgtagttacttaaaagttggtgcatttggtcataggatttttgtaggtttggtgaaaacctgaggcattgacgggcagtgaagagagtttgaagttagagccgaagtgccaggtgtcctgttccacccttgtgcctgtgaatcgtgacctcaggcaagctgtttgacctctctgagcctctgcttcagagcagagggcgtgtgcataggcgcaaaccctggagggagttgtcagttctgggggaggctttgtggaggtggtggcctttgagccaggcgtagacggataggctgctggagtgcaaccccttgagcagaggcgtgcagtttagcatgatgagccagatagggccaagcagggctggcatggctgggttgggacctggaaacgtagcttgggaagctggattttaagtatgttgctttctcagttggaatcctgtgggccaggtggcagatgacagggctagcttagcctggagtcagccagtgtggaatgtgggggaaaagggcagacggtgaagtctgacacactggccttgggaagcccctggaggtgtcagagcctcattctttgctgcagttagctgtgtgagggtcagaggtgcagagacagccctacgtgcccttcccaggtatgtgggctcactgtggtgtggtgggtgagcaggtacttgagagccacaggtggctttggtgcatggtcactggcagcaggaggaactcagcagccacactcctggttttctttgacatggtgtctgagtttctgcccgtgccagtggcctggaaccctgtggcttactgagagccactttcctgctgtcttgctgctgctgaacactcctggttgtctcctgctagttacagcctgagaagcagctgctctggtgccccacgcagacttccagacctcaggctttgggaggaatgggcagctgacatccctaggcccatagccccacatgctcctgcagacatagtggaggcgctcagtggctgtgctggtggctggatcaactctgcccaggattggggcggggcgggggtggggggtggggtgccttagcatgatacatcttcagcaaattgtgccaggaggcaagggcaacccacttgacggggtaggatgctgaggtgcaggagaggcccatccgaggtccacactcctttggcccagtgctccttcccttcacatcttcacctcttctgtctctctgagctcaagctgccaacaaggagggagcctctgtcccaaatggtggctggaattgaagagatagctgagctggagtgaccactggggctggagtctagggtgccagcatttgttcgtagatttgtccatctcttcttaaatgggggtctttcagattcctgcttaaaacggcctgtactctggagcctgctcttgaggtaagggggtagagcaggtgaggtggtctggggtcagttggcagaggggctttttgagagctcagctgtggggggagagtcaggaaggatctgctgggcagagtgagagacagatcttggaaatgtcctgggcccaggaagaagccaggagcatccagagaagtgctggcaggaagggcgtgcgggaagggacagaatgccccgggaaggcagtctcagcccagcctggatggtaatgggggcagccagggctggttactgaggctgtgtatggagagctcgctgcaggtcagttgagccctacagccaaaggtggtggtgtccctgttttccagatgagaaaactgaggcacacaggttaattaatttgaccaaagtcacagagttttgtgtgtgtgtttttaaggaaccatgcctgcttaccaccttcaaccagcatagtgccaggagctggggctctgcggacaaatggctggtccttggttgaggcaggaaacctggccctcaaggatgagggaaggaggccatccctagatcaccccaacatgaatggcccacctggtcccaggaagtaacgtggcatggcgcccaggtcttgggtggaggagatgagatggaagaagatgctgcctctgcccccgcattctagggggggcccagcatgagctaaggagggcttcctggatgtggagagctgggaggaattagataagccagaggggaagcacttcctggagaatggaaatactcgcttttcagctaatttattcttttgtttcattatcatttcccacttgggtctcgcatccccagggccctgaggtggctgttggaggtatttatggtcccgggtggggtgcagggaccagttagaaaccagtcccactcaggccatgatgcatgggtgtgttcacatgtgaggaggagccaggcacagactgagctcaaggagagggaacgcatgggtcagggccttgaaacattctcaggagtggtgctgagtggagagatgggggagggcagtgggctagcatgtttgtggtgggctctagagcttgggagcttcagagttgctgcagttgtggctggggttggagccccaggtgctgtgcagggaggttgggctcttttcctggggctgggggtagggggactgtcactctccctaaactttctgagcagccaggctaagcctgatagtttttcctacaggccagggagggctgcagggttgtccctgctcagaagcaagaggggcaggggcagctagcccacagctcacttctgatttgcccaccactcaccctcgtcaatgagtgttccttagatgctttttttttttttttttcccctgagacagagtctcgctctgtcgcccaggctggagtgcagtggcactatcttggctcactgcaagctccacctctcaggttcacaccattctcctgcctcagcctcccgagtagctgggactacaggcgcccgccatcacgcccagctaattttttgtatttttggtagagatggggtttcaccgtgttagccaggatggtctcgatctcctgacctcatgatccacctgcctcggcctcccaaagtgctgggattacaggcgtgagccaccgcgcccggcctagatgctcttcttttaaaattcagggcacttcgctgttctgctgaggtttatgaatgtttaaaaactgctttgcggtccccaaagtaatttgacaagtctgacagctattgattaaaaacccgaaattattcaggctgcaggatgacttgggggattagatggaaagttttttgtttcttctctctctctctgcacccctcctcccccgcaaaaaaaaaaaaaagaaagaaagaaataagatgtggaaaggtaaatgtgttcctgaatgttttttgaaaactccattaggcttgcacagtttatacggggagaggatgttgaaggctgcctctcattcaggagccagtaccagcgccctctcgaatccctggtctctccggagctttggcccaagtcaccccaggcagcagtgagatgttgctattacattattacaggtgatggtagtggtgttggtagcagttatgatagtttatggtcccttatgttctagggagttgacgtagggtttttgtggctttctctgaagtagctcagcgtgtgaggaaatggcacctagaagggggaggaaactcgttcagggtctgtgatagaccttagatacagctgggatagagaccaaagactccttcagggagaggaacgggccgttgctggggtgctgggctgattggatgcctggcctccaggcctgactcactgtgaggtaggtgccaagagtgtcccacagagggtgaccaggccgttagaaccccagctttcacttctggaccatgtgacctagccaagccactccctgtctctaagcctcagtttcctctttagagaacgtcctaaagcttccattgagccttttggattaactggctcatgtattgccccatgagccagggcttgtgggacctgagcttgaatacccactctccctttcttctggggcagtgctgccttttgtgcagagttgttgggagaaggccatgagatgatgtttgtactttggtgagaacacctgcaactggcacatggtaggtgcttagtaagtggctgttaggtccaggctgccacagtgtcattcatttagtcagcctatattgggcaccacgggacaccaggcctcacagcaagcatgagctgtcccatcctcctgttttggttgcagggtgtggaccctcctctgccagctcagccctgtgatgtggggggaagcacaggctcccaggggtgagggcagaaggccacgtgtctccctgtctcacagcccagggcgttctgtgtgtatgggggcgtcacaactgggtcttggtgactgctaggacctaccccttaccttggcctgagggaaccctgggttgagagggaccacgcctctgggccctgtcatccctggaagacttcccaggcagggcagccaacctttctgcctttttaggacaggctctgtctccccagggccctgggagccaccaggcggctgcattcctctcctctcccctgggatcccagctgggccaggagtgagcactggccttctgagcagccggttcccaggccagcggggcaaggctgggcttggggagagagctctgctggacatactaggcagggcgctgccctgtttatgtcctgccgtttgattcccagcaggtcagtgcattcattgtgaccatgtccagactctctttttttccagtgtgggcagacgcttctagcacagcctctggacctgcctggctatgacaggcagaagcatgattggcatgttctgacctgatgaggcctagagagtctgctgaagtcctgactgcagaaccatcaggtcctgccagcctttgggtgggcaccaactctgtggagacaaaccttgtccaggatttctcttccttccagacctggttggggtagtggacagtggcttgggaccacacaggctggtgggctggagactggggctggagatggctgtgcttgggagtcccaggcagaggggctaaaggggcctcctcacgggggtctactgcccactgctaggcacaccttcttctcctttcatttcgcctcaggaaatgaagggctttttaaagaaatttgaggcatcccagagcatttgggcagatatgattgatccccattttgcagatggggaaaactgaggcatggagaacgtaaagcgtttgagtcgtcacgggacaggaacaggaaacagcctgggaagtccatatcttgtcactccaaattgtcaaaagtgtgacctatcccagaaatgtcagccttgatagcagcgtgtgcatcgttcaccagtgttgttcatagctgtgtctccagctcctgacatcgtggctggcaatgaggtgggcgaatggaacagaccaaagaggcatgaacagttatgagcaatggatgggagtcactgacacccctgccctcctgagcctcccgcctgcatggtctcatttgatccttagagcaacccatgaggaaggtgtgtcgttatcctcactacggatggggaaactgagtcctagagagtcgaatgacttaaagtatccaaggttgtatatttcataaggaatagagactcggtttgctctgcagccaggcacccttgacactaggccctctgtcctcctgcccgctcgcagctgcaggtgcatttctgtagcattcacttgtgtgcgcgcgcgcgtgtgtgtgtgtgtttaatcccagggcccactgcactgcctgcctttgtgtactgcccagcccattaccctggcagccctagccatgcagcatgtcttaaaggggccccccggctcctgcttgcacactttcagagacagggagcccactctctctaaaaccagacgagcctggcccattcaaggacagctgtgactgagctggaagtggcctctcctggtcccagccttgccctttggggccacacagggcagctccctctgagctttcgagatttggagggtgaccctgagccccttattttccgaccaaacaatcccactctcaattccccccacccaatagttgggaacacccttgctgtgtcaagtagggatttttaattactgtaagtttcggtttggggtcctttccctccttggaataatgagtttgctgagcttttgtgtcaccgaccttttaagagaaaaaaggatcagagttgaaaaacagcttgtgggttggctggaacgctatcagataaggctaggccccaggagccaggacagtgtccccattgttctgccaccagccctcacaatgagctgctgttgggccctggcgctgtctctcatagcagctccccgtgccttgtgcccacgtttcctgggccctgggcaggggctgccccatccctgtatcccccggtccttccttccccacctggagtgagtgggtcacagctagtgggttagctggctgtggacctttccctgctgcccggctgctgtggacctttccccctgcccggctgctgtggacctttccctgctgcccggctgctgtggacctttccccctgcccggctgctatggacctttccctgctgcccagctgctgtgggccacccctggacgatggaaaggccaagccaaggctggtgcagttagtcttgaactccgctgaactgggttcacatctgactcggccacttgctatgcatgtgatcttgggcaggtcacctcaactttctgggtgcacctttttagtcctgacaggattgtcacgagaattaagtggaacaggtgggagattgtggccctgagccgggcttaggtagcgtagtgtgagctgtctgtctggagagaccagggaccactttgtggtggtgacattgggctggcccttgaaaactgaggaaggactttgtttggcaaagaagtggagggagaggcagaatggacaggctcaggagactgcttggacatggacccctggaggataagagtttgcagctttgtcaggaagtagctggggaggagagtccaggtcacttgtgcgaggggcctttcaggagggctcggacaccagcttgaggcatctgggacttgattatcttacaggccatgaggcgagagaggagggacaggagtgaggccatgccaggcggagtggcttgttcagtggagggtgctgctttggtctagacaggagaaggccagtggaactcccattcccctctgccctcccatgccctggccaagctcctctgtagcagcggagtccagggcaggtcaccctagccatggccttggctgtcccgtgtgtgacctggatgtcatggtgccacctccttcctgggagcagtaaggattccatgccatggaggacaggtaaagggtctctagtccctggagcgctgtcatggggctagtgatctgccatgtttagaagggtctcggctggggccgtggggagcagtgtgcagccacagagggtaggatgagcctcctaaccttgagagggatgggggaagcggcccatacttggacagagcaagggcaggggcatttcccggagactctggaatgaacattggaatgctgctcttgggacttggccttgaacaggcagctgccctgacgacccaccctcaggccttcttcgtccctcctccaagggaacaaccacgtcaccagggtttgcaggctgagggagggctatccctatccccactgacctcccgttccctctgagcttagctgaccttggctgctggtgtgttggggttttggtccaggaactctaaggctctggaccttggagccagccagacccaactttacccacaaggagccccctgcctgacaaggagccagttctgtgacagaccttcccagcacagcctggatatggctgtctgcccagggagcccaggaaggcttcagggaagaaggggcactgaagctgggtgctgaaggttgggtaggaaggggaaggacagcatgtgcctggggccctgcctgagactcctgcttcctgggatggaggggcccagcaggcaggccgctgcgagagtgggcctggtcaggtggagcagggaggtagatgccagccagtggctcagagtgccaagttctggggctggcattgaatcccgtgtggtctcaagaggggatcccttcacccccacaactcaaagggctgggaaatacctccccgtgaaggcgctgtcttcacagcactttcagcatgtgccggctgccagtgttttctgggtgaagcaagccaccttcctcctttttcagatgaggaaatggacccaagaggtttgggtgtcgcagcaacactagatcaaagatgggatgctggggcacatctcttgccctccctggcaggcctcagtttctcccctgtaaagcggggtgaggtcagcatctgcctcttgggctcgtggagattctgtgaggtgacttgtgtggtggttcatgtgacgcatggcccaaggtaagcccggcctggggacgccagctccaccctggtgggaggcaggcagtgtggagtccacgccctggtttgagacctgcttctgtaggtagtagaggtgccacatcctggcagggttgttgtaagaagtagctcagacctgggccgtggaagtgatttgcaggggtggaatccccatgtgaaggccttttgccctccttggtgccacctcgcctaggggaccaaagctctagtctccaaggaccacaagaggtcagaggggaaagctgtcatgagactgagctaggcacagggtcgggaggatgccgtgggccatgcaattgggccaccttctcttccaccccagccttgggcagcagagagggacttgacccagggctgggggacggcagaagccctgaatacaggggcatcagcccccagataccacaccacatagggtagctgtgggcatggctcctggactgacctggttcccatcccagcagggggccttgggcggctcaagtaactgctcctccctgagcctgtcatacctttctgtaaaatgggtagatgaatactcctggcagggctgtgtgctgttgaaatatgaaaaaagggatgtgcaagtgaccagctgggcgctcaccttgtgctgactagaggtgggtgcctacaggcatcccttcctgggagtggaatgggagtgaggtagagaccagtgcctgcttccctcctttcacctgagcgtcccgggtagggaagctgagcctatccctgcccctttggagcctgggcagtctttggtacccatcttctgccctgcctctaatgcgctgcttccctaggctggcaaggcagaggctggaggtgaaaaaggaagtggcccaacaatgccagcatgggatgaagccagggtaggggagaagcctgccttgggtgactgatggagcaagcagtccctgctgtgaagtggccagggactgctgcaagcacaggacagggctggcttcccagagaggtggttcttgggccttgaattggtcctgctgggttcaggaagtgaccaaatgaccatttttccttccttagccccctcatcttatcagctaccaccatgggcacaccctggcagggtcacagcagaccagctccctctgggcccagatgagggagggaccgaggacactgtgtttcagggcctgtagactccaggctggtcaggaaggaaacgcataggaacgtgagtgagagagtacgggtccactggccctgcctccaccacccacccgcttgctgtactatccaggaaggagtagcctgggagagcttgcgggaaccacttggggcctccctgggcctgccctgcccctattcctcttcctcccagagagcttgggctgcagggatggatgcagcctctgctttacatcccaccccgtggagaagctcccagggaagcggggagggtcatggctgcccaggtaggccgggccagtccaaggtgtcttaagggccttgagcttccctacagccctctcttctgccaggatcctttccaggtcagccagagcatgcttgtgggacatggtggggaaggaaggggagggctctgcaaccacagactccaggatctggctgttttggggtctggcctgggcctgctgggctcctggggttgcaggaccagggtctccttgggtttccctgggcaggcccagcctgctgaagcatgcctcgcctctcctctccacagccagctcattcatgcgccccaggcaggaggcggcctcagctcaccagctccccgctctgtacttcctgggtccctaccccaccctccctggctcccagcatccttacctggcagagattttccaagctaggccagaaagcagcccaatcccagccagtgtgacttccctactatcaggcagggcgtctcttccactgaggtatgaagccccatgtgggagggaggcctggagtccaccctgggaggtgggcggctcaggtggaatctcagcccagggagggcaggcccacccacggcactggtcattgccgtgatggggaggaggccaggccgctcgagcaaggccttgagggattatcaggagaagaggcctgttccaacacagcggtgtggcggtgtgatgtggtggtgtggcggtgtggcgtggcaggtaggccagtgcccctttgtgaactggacctcccagggagagtgcctcagaggagcagaggcacatgctgggcttgtccatgggcttaggccacaacgggaagccccaggtgggagtccttgtgggagttggggagggttcccccctgtcttgaacttgtctcacagttttcctctggctctgcccattccctctgctttcagaggccagcttcgtgctgggtgtggagaggcagagggagccggttgactggggctcctgggctggcctctgtggggtatctaagggttgggattccctcagctctgactccttacggcatctagcatgggactccatgttggggagggctcttatgctcagagggctgttgccatggagatgtggagcttggggtgggagggtggctactgtcagcctgagtccctctgagcagggctcttcctgctcacctctggattcttgagcacccatggagtgggcctcagcccgctgacccggggcagtcgcagaaatgagtgtacagggtatgcatcctacagggaagtgtctggtggctctgccaagctgcgagcccctcaaggtcagggaccaagcctcagcatagcccaaggtaggggtcttggtttggcgaggcagggagagaatgatggactgagcacttggaccattggaaccaggagccaaagggcatagggcgttgggggtaggaggtccatgtgggctaagcctggagtaggtttttcaccaaccccagggtttgagccctggacacaagcagggctcagcttctgcaccagagatggtcttagcaggcccagcctgtcctcacgcttttcctctgtcccaccgtgggggctgggggctctaagaggacactgctctgtgctgctgactttggagagactttacctaaccctagagcaggtgtcatctgcggtgctttccctgtgatgcactgaggaaacaggctcagaggagaacgatttccccagggccacacagcaggggagcagcgggcccaggtctggtctgcgtttgggtgccgggtggcatcagccctgtgctctttgtgcctgtgtcggagccactgacctgggccctgagtcccagcatggggaccccgatggagtgtgtgtcttgggtactgtgcagagactgctgcatcccttctgcttcgagactcgcctcgcctcgctgtcctcatctgtaagatgggagcagcagggtccctgtggctttccctcgtgtgggtctgctggtgtgggacagtgtatgaggaagggctgttggcagtggtatgctggataaatgttggggcagagtgactgctcagtcttggacaaggaccagtgcaaaagagaggggaaatgggaaagcgcccagaactgcagacagctgcctgggtcaggcgggctttccttgggtctctgagacttctcaggagccaagctggcccaggccccgcaggctcacttgcaaatattaaccccggagtggcgcctaatcctcaccttcttgctctctgagaggctgagcccccagccagactcttgcagtcgggaggaggttcccaccagtctctgtgacagccctgcccccagatctgtcttaagacagaaaggagagagagtggagaggagtggctgcctgctggaaggggcacggccagggcagatgggtgggacatggcaaccagcttgacccgggctgtgggggcccacctgacacacctactgccaccccaggtcccatctgatgccgaggctgaaggagtctcgctcccacgagtccctgctcagccccagcagtgcggtggaggcgctggacctcagcatggaggaagaggtggtcatcaagcccgtgcacagcagcatccttggccaggactactgcttcgaggtgggtcccatcacaggggttggggtggacaccccatcctctcctggcctggctggtctcctccagacatcctcctggagtccagtctgctgtggcctcagcaggggccagggtcttggggacagtggctagtagttaccgatagctttcagctcctaagagacctggtggagctggggtggaggctgtccttcctactctctaggttctctggaaatgggccagcacctgttctccatgctagcctgaagctgctggggcccccagtggatgacagtgagtaggggaaaagcctgaatttcttaagcaccagagcccatgtcttagagcctgctcacctcccaaatgcagtgtggatagcagagagtctccccttgtctgggcctgtttcccactgtgaacaatgagagcccaaatctgtcctgccctggcattctgcgacctgaggtttgaatgcagagagccagtgacccacctggggatgacctgtccagtccctcataggaaatgggggatctgaggcccagagaaggcacaaagacatcagaggtcacacagcaaggctgagaccaagccgggagcagggttactattgttgcaggtgttcctgggagttactaattgcttctgcagttattcatattgcttcctaccagtttctgggaagattcctacccccaataatcatgcataactaggagagctctcttgtagaggaatgagcctggtaatgaaaagcagccacttggggactagtgtgacaatctcctggcacccccagccctggggaaaaaacagaatggtgcctggcacctgccccataccctgtgcccactggggaccatttctggttcaggactcctggccaagccaggcttgatctgggttctgacttccttgccagggatagggtgaagatggccctgtctgctggttcacagcagggggttctgtggagggtgcaggccctcgaatgccgtgtgaggagtgtgcttcccctgcagagacccgggtctgctgctggggacagtggaaacacacagcaggaattgcccggactggctcccttacctggcaggagatgtctaagctggaccagaggttgagtgagagtcagacagagagggaaggagaagggtcagggactggggaccctagggcctggcacatccagacagtccgagtctcatttctccagtctggcataaaaaatatcaggcttatattaccattgttgtcactgctgcttgacggaagagaaccctcagagttgtcagctgaggactgaggggattctggtacctacctttagttgtctccttggttcttgtggttccgcctttagggaaagtacgctcgggttaagcattgccctctgacctgggcaaggtcttcgttcattccctcttcccatctcagggagagggaggttagagttaggaagatgctttcctattggacagagggcactgagggacgagtgaggagcctgctcgtgcaggatggggccactctccggctgctgacttgccctgggacagtggctctcaagtgtaccacctgcaaaacatgaagtagaggcgtcatatgagccttgtcctggctccttcctgaagctgtgatgcagacctgatggccagagtcccctgagcctccaaggtcttcttccatcactgcctgcccttgctgtggtcccttccctcataacactgtcttgcctgctccccacaggtgacgacgtcatcaggaagcaagtgcttttcctgccggtctgcagctgagcgggataagtggatggagaacctccggcgagcggtgcatcccaacaaggtaagcctgcgcccctctcaccaaagcatgggggattgaaggtaggctcagataggaggaaacaagagagactatctctgtggtgtgggctgggattgggggtggtcagcctgcatggaggcagggcccgagtggacaatattggtggactctgaaagagacgtttgagttgaccaggttgagacaggtgctgtgtgcctctgttttctaagctacacattgaggctgggcttggggaaatgagtgctggaccctggggtccttctgctgggaccccttgtccctactccccagcccctggctgagttctgctcatcttccccttccaccttagatgtctgcccctcctccaggtgaggacccctgtcccaggctggtgccctctgtgttcccactgcccctgggctcccccattaggtcctgggagcccccactgtaatccctgcttctgtatctgtctccctagccgacttgagggcttgaccaagtcctggtcaccatagccatctcttaagttacagtacagaccagcatattaaggaagagttaataatggcatagcctgtgacgtgtcaggcgttgtgctggcctctctcagtctcgccctctatgagatgggggttttaccttagtgccgtttcatagacaagcaacccaaggctccagttaagttgcttgcccaaggtgagtgagcttctgtgaggtcgaccagagatccagcccttgtccatcatgccctgcctcatcctgacttagggcctaggcgcccgctgccgcctccaccttcagagctcctcctgggtctgaggactctctcaggctctgggctggttgggggttgcacgtggcacccccagctgaccaccctggacccccgtgcacatacaggacaacagccggcgtgtggagcacatcctgaagctgtgggtgatcgaggccaaggacctgccagccaagaagaagtacctgtgcgagctgtgcctggacgatgtgctctatgcccgcaccacgggcaagctcaagacggacaatgttttctggggcgagcacttcgagttccacaacttgccgcctctgcgcacggtcactgtccacctgtaccgggagaccgacaagaagaagaagaaggagcgcaacagttacctgggcctggtgagcctacctgctgcctcggtggccgggcggcagttcgtggagaagtggtacccggtggtgacgcccaaccccaagggcggcaagggccctggacccatgatccgcatcaaggcgcgctaccaaaccatcaccatcctgcccatggagatgtacaaagagttcgctgagcacatcacc

SEQ ID NO: 15539 - DNA, 80515 bp, Homo sapiens
cgaattaactggttctgtctgtacgactgggagagcagctctcgctaaaaatagcgccctgcccagctcgacctgcgagccgccgttggattctgagccgggacggctcaaggagccgggagccctgcacacccctcaccccgggcctggcccgggaccgaccacggaggcggaggccgcgggcaccgcgctggccccacaggtgccgcggagggtggcaggcccgctggccgaggcactgccgaggccgtccgagatgggagctggcggtgcctccttccgcgccctcgcctgggcctccctgcccctgctggggcctccagcctgcgcgctctgcgaggacacgctctgctgcggaggtaaggccgtgcgcctccaggcgcgccctcgccctacgcgggcacttgcccggggcctgtttctcctccttggccccagatccgcgactggcggcaaggtgaggacgaacacaggcatccgcgtagggctgggaaaaggaggcaggagctctcagcaaacccacctttagctggaaaacgtcgctgtcccgccaccacggtccgaaaagcgttcgccccgctctggcctcagtgtgcctatctgggaaatgggtcaataagatagtcacgctttaatattcagtcacgcttgctgaagcgggtcgcagacgttcgcgggacgttccctccagccagctggagtcctcgggagtttctgttggtgggagtgctggggtgccttccctgtgacaccccgcactgtccccttcccaagctctagttccccccattagtccccggctcctgaggttggagatccacgcagggcgcacataaaagtttaaggggtcagcggatgcgggaagattctagcgggaaggggagctgtagggtggaagagggataagtaaagcaaagtcgcggcccactcctcggtcccgtaccctcatagcgccgaaacggaagcagaggttatctctggactcctggaggcctggggactccgggaggggagggggcgtgtggtcccgccggcatctcgggccggcaccaggctggggagcgtgtgctcggagcggagggcctcggctctgcccagtccggcctgggcggggcggtggtggggaggtcgattgaccaaacaggtgcgcccccgcccctctgctccccgcccgcgctgggtcccgggcctggcgggcggagctgtgggcggctgggcctgcgattggcagggctgggcaggccgggtggccgcgggagcccgggagccgtagagcggcggcgccgggggaggcgcggagccggccgtagcgcgctcctgcctggccagccgcctactccgcccgccccgctccactcggcccagctggcgcgaaggaaactttcctgcagccgcccggcgacaccgcgactccgccgcttcgcaaccctggccctgggccgctcaggctccggagcctttgggatggcagcgcccagcggcccggcccgcgcgtagaggtaaaagctgggggccgcggctcaggtggaggggggctcggtggtttgccgggatccgagcggcatcccgggttcgagaggatccgggggctccgatgcgaggtgttggggtaggggactgaggaatgggcggcgactttgctttatttaccccgcttttcccctacagtcccctctcccgcaaggaaatctgcgcgatgcattgagcctttaaactttcctgtgcgccctgcccagatctcgaccgccgggacccagggctggcgctgggttcttgggagagtacaatacaggggatcgcgaggaaggcgcccccagctggggcccgcgggcggcgggagttgggggtggggggtgccagcctaccgatccccaaggcttccagcggtctcccaaacttcagaccttcctcagctcaccctgggaattggtgatagggcagccaaccaaacctctttatccagagccaggcaccccctggggcacccaagttttgggtgtttttgttcaatcctggccaatcctaaattatcagggaggcgattggcagggctgggtcgttgaagtgaggtctcttttccgtttcctgggctgctctggaccccaccttccgtgaaaacaccttgggctaagcagagtgggaacagggaccaacgccacctgcttccagtgctcagcctggtgggaatgactgcagggtgttctggtctcaggatggtccactcttgagctatctggtgtgagccatatggaaactcctctccctctggccccttctgctattaaggagggaaattttaccttaattttgattgtgagtgggtgagtaggtagcttgtcaccaataaggaccaatctttaacattagtcctccttaatgttaactcctttccgtgttttactgacccaggacagaatacctaagagtaaaaaaatggaaccaaacacctagctctggagcccagggaatctgggttccaacatcagcccctgctgctcactagctgtgtatctgtgggcaggtttcctaacctctcagagctcaagggtcccgtccaagggggatatagggaggttttttcgaggtgaggcgtagaaggcgcctggctcgtaggacagccatcttaagcagccgatctataccctggagcctgtgccctcttgctgtctgagagagccagcatccttgtgcctcagtttcctctcccccagaaagttggtaaggaccagcccctcttaatcagcccttttgagaaaagtgcacagatgcacacacccacaatttcagtgggtttgtaggctcaggtttaaacagcctcacacattcttatccctgcaatgaactattcagaatgtacaaggcttctgtctatcttgatctttccccctttccccaccccttttagacacctggaggtaactattgtaaatggcaaggaagagcaaatgaactaaataaccagcatgatggggaaaagggctgacctgcagaacctggcccaaagtcaccttcaagatcacctggccctcctatccccgcattcttccttccctggtgctgtgtccccacttggtgaacatctagtcttttttgctaggatcctctagtgacggtgagttcactagacagttggtttcatgattgggaaactcttggtttcatgattgagcaacattcttcctgtttgggacagaaatctttgtctctatgacttctatccactggttctggaacaacccttggggcatttcttactgtctcaattattcactgtggtcccctggtgcctggcattctgttccgtcccttcagcattcaacacacaggcactgaggttggtaatgatcatagcactatttattgagtgtttattatatgccagaccctgccctgaggactttacacatattattttcttgcacccataaaacaaacccatgaggttgattattttcttatccttattttgcatataagaaacaggtttagagaggttaagggacttacccaagatcctacaactggtaaggggctggctgggctgtgcaccaaactcagcatctgtatctgtctttagagcacatgcttcgcttttgatccttgcttgcatacatgcctttgtgtgtgtgtgtgtgtgtgcgcgtgcgtgtgtgctcctgggactggtgtgtgccagcaatgcttttatcacaagcacctagagcacctgttaaaatgcagatccctcatctctactccaggcctgggatctccactttaaaccacccgccactcccactcccccccaacccaggccattttcctgcaggtcacagttcgaggaccatagcactaaggtactcttaggaagagaacgtggaatatagttttcaacagatctgaatttagtcttggcttcactctctggagctggttactcttcctttctagggctttctcccaacttaagatgggtatgctgttccacccactggtgggtggaatggagcaggcccttggctgacgggagccctggtgaagtttctcctgccacaagtggatgtacttgcgggcagacctgtggcacccccaagatcactggcctctgctttctaggattggtgtgccttagacgaggccctcgtgctcaggttattatattttggagacagggtctcactctgtcatccaggctggagtgtagtggtactatcatagctcactaaggcctcaaactcctgtgctccagtgatcctcccacctcagcctctttagtaactgcgactacaggcacatgccaccatgctcagccaatttttaaatttgttttgttttgttttgttttttgagatggagtctccctctgtcacccaggctggagtgcagtggcgtgatctcggctcactgcaagctccacctcctgggttcacgccattctcctgcctcagcctcccaagtagctgggactacaggcgcccgccaccacgcccggctaattttttgtatttttagtggagacagggtttcactgtgttagccaggatggccttgatctcctgacctcgtgatccgcccacctcggcctcccaaagtactgggattacaggcgtgagccaccgcgcctggccaattttttaatttttagtagagatgaagtcttgctatgttgctcaggatggtcttgatctcctaagttcctgatgctcctgcctcagcctcccaaagtgctgggattgtaggcatgagccactgtacccagcctctgctcagttttttcacccagagtggtgaggaccctggaggggttggcagaaacctctccctcccctcaacaccttcttcctccatcctcctactgtggcctctggccctcccagccagaaggtgctgggcctgcatctcgcggggagaggagcggggtggttctgttgtgcgtctatctatgttttcaatctccatcccttcccttggaagaccgctctgtgggccattgggcagctttggggaaatgtctggcccgaggctgcctggcctgggctgactcactaggagagatacagggtggaggaatcgcctgcatagaccccagctgtatcacaattctggcctaccagctgtgctgcagacagggtgcttgttctgccttggacctatttgatcctgctgaaagcacaaattattaaacacccattttatgaaagaggtcactggagtccaggaaactgcagtgacgtgtccaaagccctaatgtgtgtatgtgggcaggggagggagcggtgataagagtcaggacctaaatccaggtgccttgacaataaggcactctggccttttttgcagtcttgttcatgcctcactatttttctgccctatctggttgtggctttggtgccagagccctcacctggaagcttgaagacctgggccacgatcaggctgtgtgatcttgggcagggctggtcatctcttaaaacgttaggtttcttttctgtaaaggggctgaaggtggggctttttgtccagatctctgaggttctttcccaccttgacatttacaagttgggctctgtctgcatttcctgtctgggtttctagggagaggtattcatgatgggctcagggcatgggtgaggggttgagttgggctggagggcagagtgctccatgggaattactatgaaaggggccagaaaggctcttatgggaatggtggccagtggggccaggacacctgggggcagtccagagggggacaggtagtggaggaagcccagggaagggggaggtcacttaccttagaattacacagtgttttgcaccctgatccttgcaagaaggtgatggtgggaatgactgggggtcaagggcaggagccaagggggagcgtgggggcactagggccaaccccactgcaggccctctcagccctgggtagtcttgaccaggagacaagggggacatgtaagagccttgtctcccttccaagccatcacatgtctctcctctgggcttcctcagcctttcctgaatctgacctgaacggttctaacctctccctggggcgagcagctggctgagggggtccagctgcctgtttcccatcccaggtgggcctccagcaacccagcttcctacagtagcccttagtaaccacagcctctgctggccacttactgtcatgtgagtgacttcctgttaaccacgagatcaaagccaagctccctggcctggcaaacacggccccatgtctggctccagttttcctccctgcctcttctttctctgctcttcaggttttatgttgcctggacttggcctgtgacttccagaatgcccttttctctctgccactgcttactgcccaaattcttcctgcccctctgggtgtagcaccaatttcacctccatttgttctcattgcccccctaagggtgagccgttcctccgggcttgtagctctttcttactaactgccctgctttgcctgtcgttgtccgctgcctgtcccccgtgatgggctctgggctttagaaattgctctagtgaatgccctagtgaatgcttggaaagctttgtagagttggactagctttgaatcaggcatgatttttccactcctgctccaactgccgtgcctgcacccccctcctcaacagagtcaagtggagagcctcgcagtctgctctgggcagggctggctctagcaagggacagaagagagatgcctttggtttgcagagaacttctctgcctcatttggatttttgttttgttttgttttgtttttaattgagacacggtctccttctgtcgcccaggctggagtgcagtggcgcgatcttgactcactgcaacctccgccttccaggctcaaatgatcctcccacctcagcctcccaagtagttgggactacaggtgctcgccaccatgcccagctaatttttgtatttttttgtagagacagggtttccccatgtttcccaagctggtctcgaactcctgagctcaagtgatccacccgcctcaggctcccaaagtgttgattacaggcatgagccaccatgcccggtcccatcatttggattgttcttgatctgcttcttaaaaaaaactttattctggctgtgtggcatcaagggggaccggcctaaaagcaggttagggaaagccacctgtcagtgtcagtccccacctgcaggctgaatttcaggtctcaaatgagaatagccaaattcacctgcttctttagaattattgttggttttttttgagacagggtctcactctgtcactcatgctggagtgcagtggcatgatcttggctgactgcaacctccacctcctgggctcaagtgatcctcccaccttagcctccctagagtatctgggactacaggcgcttgccgtcatgcctggctaatttaaaaatttttcttcttgtagagatgaggtctcactatattgcgcaggctggtcttgaactcctaggctcaagcaatcctcccaccttggcctcccaaagtgctggggttgtatgcatgagccaccgcacctggcttctttagcattttcttaagagtgtttaaaaagtacttgtgaagggcctgtgggggttattgggattgtgtcgggggcccacagacatggtccccacagacatgaacatcgaggagtcacataactgttctggggttgcacagttatttgtggccagaaagtccacagaaacatctgtccctgagttcagagagggctgttgagtctcagaggccaaaagggaaagaaaaaaatgaggaccaaaaatatatactaaggttgggtgtgctggctcacgcctgtgatcccagcagtttgggaagccaaggcgggggatcacctgaggtcaggagttcaagaccagcctggtcaacatggtgaaaccccgtctgtaataaaaatacaaaaagaaaaaaaaataaagaaagaaattagccaggtgtggtggtgcatgcctgtaatcccagctactcaggaggctgaggcaggagaattgcttgaacccaagaggtggaggttgcagtgacctgagatggcaccactgcactccagcctgggtgacagagtgagattctgtctcaataataataataataataatgtatgctacagcacaaagcatttatatcacactttctggtgtgcaaggtgctttctgcagagggtcccctcccagtccccctgtgactttctgctgaggaaaccaaggctctgagaaacacagctcagctcccatggctggaaggatgcagctcaggacttccctgactcccctcactccaggtccagtgctcacgggcagggctcagagtggctgttggaaggaggctctccttattgacggctcccaattcagagtgaggatttttttttctttgacattcttgtgttgggatcattttccctgttaccatcattggatgagtgtgaactcaggcagtggggggtgagggaggtgggaccagggagaatggcagcgttctttgttttttgtttttttttttttcttgagatggagtctcgctctgttgcccaggctggagtgcagtagcgtgatctcagctcactgcaacctctgcctcctgggttcatgcagttctcctgtctcagcctcccgagtagttgggactacaggtgcatgccaccatgcctggctaattttcatatttttagtagagacagggtttcaccatattggtcaggctggtctcaaactcctgaccttaagtgatccacccacctgggcctcccaaagtgctgggattataggcatgagccaccatgcctggccggcagtgttcttatgaacgtagagaacacctgcgcagatgggtcaggtgaccaggtcagagatctctgtcctgaagtaggaagccccctgtccttgtaggtgacagtggctgatacctagtaaagactcatcttggagtgaggtctgatggatgctagggtactggagggagaggagagagattgatgatggtctggttttatgttcacatactcctatcattcctttgggtttttcttatttttttgagatggtgtcttgctctgttacccaggctggagtgcagtgccacaatcatggctcactgtagcttgaactcctgggctcaagcaatcctcccatctgagcctccaaagtagctgggactgcaggcaagcaccaccatgcccagctaatttttttattttttgtagagatggggtcttgctgtgttgtccaggctggcgaactcctggcctcaagcaatcctcccacttaagcaatcttcccactttggcctcccaaagtgctgagattacagacatgagtcaccaccccatcgttcctttgttgcttcctgtcctacttactattgccttatcagtttatctgtctctgcccctgcccctgtccttagacagaggcatcctagcacaggtgcctcatggttttcccctctgggtgaccctggagcaagaccaacctcttaagaggggaggggagggaatgtgaataagtaaataaataagcagatgaatgagggactcttctcagcatctttggtgaccctgtctgactatcactggctgtagaatgtgtgacaactgagtctaccaggcaacggctgtttgccgggagcagcaggacccagccagaagacataatggaagcaggccctggccagagcagggacctcagagcctttcccggcagagggaacgcaatcaaagctggcgctgcttccgggaggagagaattcccaaaaggctctgtcagcccctctgatagggatctgcagggtgtgtgagagatttgtttttcagccaggatgtggggagttaaaaatagacaccctaatcccttgagttcgtgtcacacttgacgctgtgcagagccctatggctccattatctcacttgagtggctcggcagcctttgacgtggggagaggttgcactgcccgctttataaatgagcgtgtggaggtgcgtgcccaatttcttacttgagactgtaccccaaattcagtggcagaacctgtctgatcctcagcccctgaggtctgtgttttatattcttaggagaagccagatgagagtcaacaggctccaggagggaagcgggttggtggaaacaataggggtagatttttaagcaaagcagcaaggatggcagggagactgagaatgaattgaggtcccagggagcaaaggctcatgatgggcttggggagcagccgaggactgtaactggttggagcaggagttgggggggtaaggtagtgatgggaataaagcagaaaagtaccatcaggaccccaaatcgaggacctagaatgctatgataaggatagtgaacataaagctgtaggcaatagggagccattgaggattacagagcacagtagcttcctgctgtaacaaccatgcattgcaatgatgtgctaactggctttgctgtaggtattactttatggtgtttgacagaatatatattttttaaaccctcagaagacacctgtccatcctgacctctccttatggaaccttgcatcgtgctagggggagcaccccgttttctgctgcctcttggtttggggaggagccccctctggggcaaagtctgtaactaggtttctcggctttttctagtttttgtttgtttgtttgtttgtttgtttgtttttgagacagcgtctcgctctgtcgcccaggctagagtgcagtggcgcaatctcggctcactgcaacctctgcatcccaggttcaagcgattctcctgcctcagcctccctggtagctgggactacaggtgtgtgccatcacggccagctatttttttgtgtgtttttagtagagacggggttttgccatgttggccgggctggtcttgaactcccgacctcaggtgctccgtccgcctcgaactcccaaagtgctgtgattacaggtgtgaggcactgcgcccagccttctagtttttaatctaggtgctcctggttgtccatctgtctgtcttccccatggtgggaggaattaagtgacagggaggaggtagtggctgaagttctagcccgacctgactcattgaaacttttacaggctgtctagtgcatctgacaccctgccactgacaagctcccagaccaccaggatcagttttctccacttctcacttccatccctcccgctttgggacccccattcggctcccaacttctccaggcatcctgcactgattgttccagcaacactgaccttttctgtacattttagtgcccatggccctctaacttgtatgtttattaactctttgctccttccctagctaggccaaggcccctggtgggcaggacaggagctaagcaagatgtaagctggacagaccattggaaatcttctggtgcgatctatccattttagaattagggggatagaggcctgggtttgcctaaaacttcatgacaagttcctggcagagctgggattcaaacctggatctccagggctatcttggtccttggctgcaacatcacccacttctcagagccaccctgcttctcagctccaagagccaagaattcccagctctgcaagaatcccagttttgcagccttggctcctcctggggctgggagccagcaacgccaagcctgcaggttcccagagagggctcctggcgtcggtgtggcttagtcacagggatgagatcactactcacctctggataggggaggatgccaaggtttgggaactttcactctgagctacttgattttgtgtatgtgtgtgtgtgtgtgtgtgtgtataagaaaaacaaaccttttggttgggactttgtacttggctcatgaactgtgggcttggggaagctgctgagccatgataagcacttgtactgtgccatctcacagcttcccaggatagtggctctgtgttaggaaggagcttggaccagagccagaacctggtgttagcatttgctctgcctcacattggctgtgtgaccctgagtacggtgcatggcctctctgggctgtaatgataatacctagcagctcacactttctgagtacttcccatggaccagccactcggctcatcagcccatttagttctcacaatagacctgtgagatcctgttttcacctctgttttgcagatgaggaaactgagtcccagagaggaggagtgacttgcctaaggtcacccagctgggaagggcagagccagggttggaatgcaggtcttcccaactccaaagcctctcgtgtcaggcactctgctgccctgccctctagctgcagggctacctcctaagggattgtggaagtgtaagtatggagaaaccaggtgtaattcagcacgtgaggggtgggaaggtgatggatgaagggtctttttctacgctgatatcgttctccatctccccactgtccttgagtagtgctgtccttgaatagtcagaggggggcgcagaggagagcaggtacagcggtatgcaggctccatgagaggaagggcgtatttgaagatggtttcacggaccgccagtcctgggcccatctctttccaccccctgtaggtcactggctttgtgaatgttgattgtaattcctttcccatcctcccctagaaggtatcttcaaggcaggggctcgctaagggatttccttttgagtggagtgaccataagatttgtttgtttgtttgtttgtttttgagacagagtctcactccatcacccatgctggagtgagtggtgcaatcttggctcactgcaacctctgcttcctgggttcaagcaattctcctgcctgagccccctgagtagctgggattacaggtgcctgccaccacgcccggctaattgtaatttttagtagaaactagattttgccatgttggccaggctggtctcgaactcctgacttcaagtgatctggctgcctcagcctcccaaagtgttgggattacaggcatgagctgccatgcctggccttgaccataggttttgattcagatttggaacagaaatctgttgatggccactgaatcctgggcttggagtaggagctaggggaagcaccaagtaactcgttcccaccccaaggaagctgagtacagcagacaggctaagggtgtgtgtgtggtctaaggtccatcagacagacctggctttgggttctggctgctctacctaccagctgtttgaccttggacaaagttatcttatttctctgatcctcagtattcttaactataaattgcggataataatacctattttttagggctgttattatattattattattttttaattttttgagacagggtctcactttgttgcccaggctggagtgcagtggtgtgatttcggctcactgcaacctctgcctcctgggttcaagtgattctcctgcctcaacctcctgagtagctaggattataggtgtgtgccaccacagtcagctaatttttgtatttttagtagagacagggtttcaccatgtttgccagggtggtctcaaactcctggcctcaagtgatccacctgcctcggcctcccaaagtgctgggattacaggcatgagccactgtgcccagcctagattaaaattatacgtgcaaagaaagaacacagtacagtgtctgcacatcataaacatttaataaatgctgcagttttgttattacttattatttgcattattattactgatggtcttcttaatgcactttatagcagtcttgggatcctctggccatacccctttccagaacttactgcctttggtgaaggtagttctgggtaggggaagatctgaattaaagagtcaatctaccagcctgggaaacatagcaaaaccctgtctctacaaaaaaaaaaaaattacctggggctggtggtgtgtgcctgtagtcccagctactctggaggctgaggtgggaggatcgcttaagtccgggaggaggttgaggctgcagcgagccggagccgtgatcgtaccactgcactcccactttggtagcagagtgagaccctgcctcaaaaaaaaattattatttttaatgtgaatgatttttctcttggagatacacagggtctcaaattggccaaaaaaggtgtctgaacatgggtttttaagggagctgctttgatgaatagagaaaggggataatagagaaaaagatttctttaaggtgcttgaaatttatcttttgcatggtatccacagtccccgtgagcttgtttctgctgtgtaagtcaccggggtgagtgtctgttgaagcaggcatgcggggtaaaggtggggcagggcggaactccaacaagtctcagctgctgctcctccctctctcccttccgagaaccgccagggtcctccttagagagagagcctgctcagcctttggggaagccacaaattggtgaagttgctgtagacagcagtgtgtgtgtgtttgtgtgttgtgtgtacgtgttggtggggggaggtaagaggtcaagtgggtttcccagaggaagaaaggctagagccaggcccaggaggacaactgctcaggtttctgcaaacaggattgcaaaatcacttttcccgagcttacccagttctccatcggagtcttgcagccaggtcagctgggagcccccaagcttggcagttaggacacttggggaggtgtggggaggggggatgtcaaatcctgcctcagtttccccatttgtcctggctattcctagagccccatttatctaggctatgctttcggacaggaaacagagggatgtggaaggagaagatgcaggtttgggataagagttgagtctgtcacttcccactgtgtgccctcaggcaggtccttctgcagctgcctgggctcctcagtgttttgaggcttcggtgaggtaatgtgtgtaaagtgcttagcacagagctggcatgaagtagtgtctgtaattataaaccaccttggccactgttgtttttagcttgggacccaccttaccccgacctgactgcccttgcctcttgccttccctggagttcctgtttgttgttgacatcctcctcaccaactagtgcagggatttttaaagtatttatatccttgctggaatttctctttgcattgtttagttaattaccaaattgaattgcggcaaataatttcacttcctttccagtgctagggcaggaagtggcccggtgccttttttttactgtgattgagatgattattgagatatttgatgatgatgatgtctccttcccctgagaggttcgcttcctcttagatcagctccactggccccataaatcaaggcagcagccacgtgcttggaacataaatcttgtcgaggatgttgatgtgtttggccacatgtggtttttggtgtttgggcaacttctcgcaaactcgcggagggatagttgaaaaggctccctttaaatacagaacaaatgacctgtgcacttattggagaagtgctgggatagttgaaaagactccttttaaatattcagaacaaatgacctatgcacttgttggagaaattctgtccaatggcatacaaattaaaaatcaaggcacagggagaagtcttcagatggcaagaaatcagtggctcttctccgcagcttgatagtgttgatggtgttggcttctgccctgtccctcatggctctagggtggagaagcagattggataaagacatggggttgaaactgatgtgctggggggcttcagatccctgccctgccacttagtagctgcaggaattaactgcggccacttaattttcctgggttctaaaacaaaggatacaagataaccggcttcataggtctatgttgtaatagttttgcttcacacaatgcctggcacatggtaagcactggtaagtaagccattacttttaactcagggatcctcatcgtgttctttacccaaagacccttcccatcctacctttctagccttgacctccttcttgcaagatgataaccaggacctaatgtgtccaggactctcccacctttgcacttctttcttttctttttttttttttttttttttgagagggagtctcgctctgttgccgaggctggagtgcaatggcatggtttcggctcactgcaacctctgcctcctaggttcaagtgattctcctgcctcagcctcccaagtagctgggattacaggcatgtgccaccatgcctggctaatttttgtattttcagtagagacggggtttcactatgttggccatgctggtctcaaactcctgatctcatgatccacctgcctcagcctcccaaagtgctgggattacaggcgtgagccactgcgcccggccccacctctgcaattctgttgtgcggtttctactatttggaacatcccctatttggtctctgcccatagaatcctttctttttctttctttctttctttcttttttttttttttgagatggagtcttgctctattgtccaggctggagtgcagtgttgcgatcttggctcacagcaacctctgcctcccaggttcaagcgattctcctgcctcagccttctgagtagctgggactataggggtgcaccaccgcgttcggctactttttgtatttttagtagagacagggtttcgtcctgttggccaggctggtcttgaactcctgacctcaggtgatccacgagcctcggcctcccaaagtgctggtattacaggtgtgagccaccgtgctgggcctcttttcctttcagaagttatctcaagcactgtgccctccatgaaatttcctatggcccctcaaccttaactgccttagtgtatccttgttacgccttatgtctgcaatagttgtcggcccaagtatgttccatggaatggtaacctggtaagatgctttgtagaaaagaaggttaagaaaaggctgctgaatactttatgtacctgttttgtatagtaccaatccatatgaacaattttaaaggttctgagaaatcctgcagtaaagaaacctgctgagatttgtttactccagaactttccaaacctctgactgtagaacactttcttcttggaatgcctattgataagctttgcgacactcctggagaggtggcgttgtagacatctatataacagtttgatgctatctcctcttataatgaaggaaaccaaagcccagagaactcagtgactagcctcaggtaaatcccagtgtctaccactccatcacctcttgggtcaattggcaggtcctttataatgagtgtccaaggctgggtggcaaggaagggctggacatggtagccaaggacctgctttcaaataactttctttctttttttttttttttgagacagtctcactttgttgcccaggccagagtgcagtggcacaatctcagctcactgcaaccttggcctccctggttcaagcgattctcctgcctcagcctcccgagtagctgggattacaggtgcgcaccaccatgcccggctaattttatatttttagtagagacagggcctcaccatattgaccaggctggtctcgaactcctggtctcaagtgatccacctcccttggcctcccaaagtgctgggattacaggtgtgagccactgtgcccggcctcaaagatcttttggccttgtcgaggtggcgagatggacatatggaatagagacagattaactgctaatcttgtgtccctgggcccatgtgtaacaggagccttgggaccctgttgtgtccctgcccaagaagggacatgagagtcaaatgtcctttgagaacccagccctgtccctgggcctgggaccccaaaattcgaccccaccttcctcccaccctgatccctggggattcctgtggccctatgtggttgcctcctgcaggatgcaggcgagggaggggcgggaaggctgcagggaagagaagagccttctgtttattgaggcacagccttctcctgcctttctgggggaaaatgctctcttttagagtcctcttttttatctgaaattctctggggagcaattacctgacagtgggaattatctgctgtctttattctagtgcctgtctgcctgagttccttcttggagtaattgattttggtaattcagagcttctgaacgtttcttaggggaaggtgtgggtgcagaggcagggggatacccacataggcgtttttaaaggcgttggcggctagcggctctgctggtggtagttggtgacagggatggaacagtgactaaaaagaatgtattttttagctttgaatttttccccacttatacggaaggtgtgtgggttgcatgggagcgctcctgactgtggaactggggcgggtttgctgaagggaagtaaggagttgaaaggcaaattgtcaggtctgatgggcttgatcactcttcgccacaggcaggtcagtcctgagtaccggccctggcccgaccctggccctcaccatcaacctttggtctgccagggagcctgggaggtggcagaaactccttggagagcctttaaagagagcagcggctcccagttggcttgacctttctgctgggcagaccgaggtactggctccagaccctgctgccccaggcactgctgtcccctgggagaagagggctggccagggcacctggcttaatagggggacagagaaggtcatgaagggtggacctcagggtgaggggcctgggtgactggagaggtttatctgttccgtgaataaaaagggagtagggtggccaggcacgctggctcatgcctgtaatcccagcactctgggaggccgaggtgagcagatcacctgaggtcaggaggtcgagaccagcctggtgaaaccctatctctactaaaagtacaaaaattagccaggcatggtggcacgcgcctgtaatcccagctactcaggaagctgaggtgggagaatgcttgaacccaggaggtggaggttgcagtgagccgagattgggccactgcactccagcctgagcaacagagcaagactctgtctcaaaaacaaaacaaaacaaaagggtgaggggagtagcgagtaaatttgctcctagaaatgctcccctagctaattccccaatttcaaatgagtgaatactctggatatgggaggaagagcttggactagaagcttcctcaggctctctcatctcaagcgttctgtgggagggacagcccaatacagcggtttccgtggagtctctcttctctgcacctcacccaagggaaaggaacctgtggggcactggtttgggtccagccccagaggcagcctgtcctttgtcatagtgaccaccctccccgctgaggtctggacactgcagctccattccatggccttcggcctggtgttacttggcattttcattcctattttacagatgaggaaatcgaggcccagggtgattggttcacaccatgagttaacagtggggcaaggcctcatacccagtctcctgatagctggtccaggattcctgtgagcctgaatggggggtcaggagctcatcagatgcccagtggaagagcggggtgcgtactcacgtgggaggggagccggtttctctggttccattgtagctcttagctggattttcaactccatggctggttacttgagtctatgtttaatcacctgctagactgagaagcccctaaaggacagggaccttttgtcacattgggatcaccttttgtggccagctcagtgcttgcatgaggtcagccagggcgctttaggtacaagacagaaggcccccctcaagctggccagagtgaaagggattttatgggctcacctacctaaaaacccaaggaggcccaaatggattacgatgggattatctgtctgtctgtctctctcttcccatttccccccagttctgggttcagtttctccactgagctgggaatggggaaaggggagtccccaagggaaatgagggtgctggccccagaagaaggagggagcagacacaggcaaaaacaacaaaagcctcataaacatacaatgtgcatgtcatgaatggtaaattcaatggatttttttttttttgaggcagagtctcactctgttgtccaggctggagtgcagtggcacaacctcggctgactgcaacctcagcctcccaggtttaagcggttctcctgcctcagcctcctgagtagctgggactacaggcgcccaccacaatgcctagctaatttttgtatttttggtagagagagggtttcgccatgttggccaggctagtctcgaactcctgacctcaggtgagcctcccaaagtgctaggattacaggcatgagtcattgtgtccggccaaattcaatggatttttgtagaaacattttttttttctcccaaaaggaattcacgctgtaggcgtgacatccaggtgcacatcagctcctataactaaacagagcaagccctgtgcattgagaaagattctgaaaccacctcttggctcagcagaaaagagcatcataatcggtttaattatttgtgcctttgccttggtggtgggggtggcggggcaggggctgtgtgtacggcatccctaatctggtcccaattttggtgttgtagaagtacttttaagagttgaaaacaattggattgaacctaaatgatgttgcaagatttccccaaagcttaaagagccaattatgtggttgggagccctttctgaccggctgtgattccatcctaaggactgacagataaattattatgtggaggccgtgatgaagggtgattgttggaaggtgtggctcttggcactctgatggctccagggagagcttcgtgtcctttgtattgttttgtttttgttttgagacaagatctcactctgttgcccaggctggaatgcagtggcgtgatctcagctcactgcaacctctgtctcccaggttcaagcaattctcatgcctcagcctcctgagtagctgggactgcaggtacgcgccaccacatcccgctaatttttgtaatttttgtggagatggggttttaccatgttgcccaggctggtcttgaactcctggcctcaagtgatcctcccatctctgcctcccaaagtgctaggattacaggcgtgagccactgagcctggccttcatatcctttaactgtgacaagagtgagctgcatggcccctgcctgcgctaacggtgtcaacacatatttattcagtgcctaccatgtatcaggcacagttttggggcagattgagataaatttatcccggattatatgtcacacttctgaaagaggagatgttggaaaaggaggtagctcttaagattttttcctagttgggacttggtaagaattgcaaatgtccttacacttgggtggagtatgttgtgatcccagtaatgatttccgggagcgcttgtaaaccacctctggtgtctgaaattccaccattagtgattcattcctttggggtaagcattgccgtttctattaatagcttaggtattaggtactaatgggatactaaatagggatctcattcatcgctaaggcctccttaggtaggaagttattctttgttttttctcccatgacaaggccctaagaagagaacccctatttgggtggagttaaactgggatacaacattgggttggtggtggaagccagagtatgtgcattataagacgtggtgcctgccccacccagagtgctaaacttagcaacagtcaaaaattgtcatcatcaaatcacttttagtggtcattgttctccaagtttggatcctgaaggcagaacaagaactaaaggtccttcccggctctgaccccctgctgcagccttccggatccagccgctcaaatgggcggctccgactcctgctgcctgggccagctgctggaggaagttgctggagccctggccaggcacccctgccctcccacccttcccagctggaggtgtggctgtttgcttccacctgtttactttctggcttctagcagctccttccacactgaaaatgccagccactgaccggtccacaaacgccgaccatccccctgctccacttgcagtggttaaaggtgtgtgtgagctctggagtctgaatgggtttagaatgaggcttgacctgctgagtaactgagctgctctttgctgacattcccatctgtaaaatgggataacagtgctaaccccagtaggttcttggaagtatcagtgaggtagctaatacatatcaggtccctggttaaaggcctggcttataaaaggagctcaatatatgtaaactttgatattatgttattgcttggggccttggccagccaccctgggggggtcctgcccctccagctgccctctcttgccttcccagacactgtgctcttccggtggctcagatgtttctctattgagacttctctgttgacaccgcttgaccctctgaggtcctaacccgggtaccctcctcacctaccagctctcacctgggagccccacccatgcccagggcattaacaacccctgaacctgggctactcccaacacagactgtaaacctcccctgagctcagatggagagaagtgcttttcactggctgctctaaaagcacatcaaccaatccaacatgaaaggcccttcctttctcctaacaaccacttcctctctcgcattcacctgctcccccaggtcccaactttcctctttgaggggaagaccgcactggccagcccctgggacagggaaccacacccaggtgtttccttccttcccttccctttttcctacctgcaagtctggtggttccccttgggcaccatctcctgcaccccatccctgccctcactgcccattaggggacagcccagccacagccccttctggtgcagcttcctgttttctccatgctgcctccagggggagtccctggaccttggtctgaggggtccctcccttgctcaaggtataatcaagtccctgcttgagggactccctattttccctgagatataatccagacttctcagctcggttttcagggcccttcttccaaattccagtaggatcctccttgccaacagttccttcctatgtgctcaggagctcagctgactgaacaacccactccatggcctctacctgttagactgccttgcctgtgtttctcaaagttcccctgcctggtgtgccttcccctcagcccggtgcctgcctgtggatctgatcacattcacaaagcctgcaagggatgtaagtcctcgtgcagtccagtcccctgtctcccatcagaatatcatggctgtttgtatttctttttttccttttttttttttttttttgagaccagtctcattccgttacccaggctggagtgcaatgacacaatcttggctcactgcaacctccacctcccaggttcaagcatttttcaagcaattctcctgcctccgcctcccaagtaggtgggattataagagcatgccaccacacctggctaattttttttttttcgtatttttagtagacatggggtttcaccatattggccaggctggtctcgaactcctgacctcaagtgatctgcctgccttggcctcccaaagtgttgggattacagatgtgagccaccatgcctgaccctgtttgtgtttctttttcttttttctttcttttttttttttttttttttttgagatggagtctcgctctgtcgcccaggctggagtgcagtggcgcgatctcagctcactgcaacctctgcctcctgggctcaagcgattctcctgcctcagcctcctgagtagctgggactacaggcgtgtgccaccacgctcggctaattttttgtatttttagcagagatggagtttcaccgtgttggccacgatggtctcgatttcctgaccttgtgatctgcctgcctcggcctgccaaagctttgggattacaggcgtgagccaccgcacccggccccgtttgtgtttcttaccctccccttggctccttccatagaagcaatactttttgcagtctgggaatctctggggtctacaagagggggatcttgccttctaggaaaactgcctctcaggggcaagatggctgcctccagaagtgtgtgctttgaggaggccaggatggggacctccaatacctgacacagggcagaattctattccttgtgactcactgtctcgaaggttacgtgggttttgtcagatacgctgggctccatggccgggagccctccactgccctcgtgtcggggctctgctttcctgtctctctctcgggaggtaagatttccacttctcagggctggggctgccgggtggattgagcaatggtgtgggtgaaagcaaaacagaagtacacaaactaataattaacagatgtcaattgttaatagctgaaaaataccaccaccaccccaccccctgcccccaggagggaggagagcaaatggtcacttgatcccttggaggagattatttcacagccagcttggggcaggtttggccaagacagtgacaagtactgtggggtatatgggcaagggggatgggaatagtgccattgccagggccactgggctttgacttactttgattcccttgtttaatgctcacagccttaagagtcaagggcagaggcattcctgagaatgagcatgtgggtgcctgggggtgtgcacgtggggcaccctgggtcctatctgccgagtctgagccttgcgccatctctcttaagcaagtgagatgcttacttaagagagcaattttgctctctttctcacctcagttttgcagatgacattggcttgacatgcctgaggtcagccccagattgccaagccggggtcctcgctgtgacacggcatggccagtccctaccctagacccaggtggcagccccaccagatttaacatccaggggtggtgcagggccagtggggactttacctagcttgagaggcctcctctttgaggcagggcaaccccaagggtgggttttaagctttcaggtttaagagttcagttttgttgttgttgttgttcttttggtggggggaatagggtcttgcccttttgcccaggctggagtgcaatggtatgttcactgctcactgcagccttgacctcctgggttcaagtgatcctcccacctcagcctccagagtagctgggactacaagcatgcaccaccacacctgactaattttggtattttttgtagagatgggggtctggctatgttgcccaggctggtcttgaactgctgggcctcaagcggtccacccacctggcctctcaaagtgctgggattacaagcatgaaccaccatgcctggccagggttaaggttgttttgttttgttttgttttgtttttgagatggagtcttgctctattgcccaggttggagtgcagtggtgtgatctcagctcattgccacctccgcctcctgggtccaagtgattctcctgtctcagcatccttagtagctgggattacaggcacatgccaccatgcctggctaatttttgtatttttagtagagatggggttttgccatattgaccaggcgggttaaggttttgagtttacttcacatctgtaagctgcttctctccttcctttgcctccatgtttgtacattttctaatgagagaaaccatccatttgttctctcacctgccttgggcccagcccagttggttctgtctggaccgcagttcccacccctcagccccaagacttggaggtaccttagattcactcctctcctagtgccaccatctcactacctacctgtgcacctgttggccctggctcaggtgtcaccttctccatgaagcagcttttccaggcagagtctatggttgtctgtgccacggacccagcggggctgcccagaggcaggagctggtgttgttcctggtgtccccaggactgaccaggttaacacctggcagcttgtaggagtcacagaggttcgtggcaaggaggaaggcatgcacctgaggagcagggtggagtggtggctgagattgctgaaatagcctacggccaaatccagaccatgccacttacaaaccagccttggacaagtcagatcacttctctgaggctcagtttgctcatctgtaagatggggaggtaaaaatacagtcatgtgccacataatgatatttcggtcaaggacagaccaataaggtccttaagatttaacaccatatttttactgtatttttctgtgtttacatacatgaatatttacaattgtattgcaattgcctacagtattcagtacagtaacatgctgtacaggcttgtatcctgggagcagcaggctacccaccatctagcctaggcgtgcagtaggctacaccatctaggtttgtgcaagtgtactctatgatgttcacacaacaacaaaatcgcctaatgatgcatttctcaggacatatctccatcattatgtaacacacaactgtacctaccttctggaattactgagaaagttaaaagacaggaacgtacatgaagcatttaacacagtgccaggaacgtaagtctcaataagtattcatttctgttgtggggatttagggggctgcgagaagagcacgctgctataaacaggccttcctgggccgggatctcggaggctaagcactcgcactgcctgccccgtccagggcatggatgaggggctgagatggggagggaggggccctgctttggcagtcagcccctctgtgacgtgtccacataacatccataggaagttattgtttttccccatattttacagaggaggaagtagaggctcagagagagaggctcagagaggtgaagtcattcacccctgtcacacagctgggagctgcagtgccaacatagatgctaccaaagtggctgggctttttttttttttttttgagacagagtcactcttgtcgcccaggctggagtgcagtggtgtgatcttggctcactgaagcctctgcctcctgggtttaagcgattcttgcgcctcagcccccgagtagctgagactacaggtgcgcaccatcatacctggtgaactctttttttttttaaattttaatttttacctttttagtagagacaggattttgctatgttagccaggctggtctcaaacttcggacctcaggtgatctgcctgccccggcctcccagagtgctgggattataggcgtgagccaccacgcctggccaatggctgggctttgaatctccctttggcagtgaggtttgggttgcagtgagtaggttttggagtttgggctgatgggatggcaggatcaggagggctttctgctttttttttttttttcccaatgatgccagttctgaactgttgcttcctggggcaccacaggcagggagtctgggccagtctggccttcagccctatttgctgtgacctgtatggtgtgtgtttattttaatatgtgatctagttgtctccattgaacgatcaggattttacatccaaatctggtagcttcttgtaaacttgatcttccggccatcgtgggcccacattccaataggacagtgtgggctggagtgtgttccccatttagcctgcctggccaagcctgcttctctcctttcctttccctcctggctcacattggcatttgcgtttgtgattcctgagccaagtgggctacagggctggggcacacgtggggtatgggccctgggagccccctctgaggagctccctactaagaagggcaggcagaattatgattcaaggcaagatgagtggccccagagagatgtctagacagtgcttggggctttcagaaatgttaatgtgttcagaggagggcatccagtgacttggcacacgtttaatgagctcttgccttgtgcctggcactgggcatccctggaggctgcagagatatattcaggacacagactgtcctcagagagcctgtgtttccgggggtgagggcatccaaaatgggctttcatggagcaggatatttgtgttggtaaaaatgaagatgtgaggcactctgggcagacgagatagtgtagaccaaacttcagacgagaaacctttttttttttttttttgagatggagttttgctctattgaccaggctggagttcagtggtgcgatcttggctcactgcaacctccacctcccgggttcaagtgattctcttgcctcagcctcccgagtagctgggattacaggcatctgccaccatgcccagctaatttttatagttttagtagagacagggtttcaccatgttggctaggctggtctcaaactcctgatctcaggtgatccgcctgcctcagcctcccaaagtgctgggattacaggtgtgagccaccgcgcccagccagaagagaaaccttgacagcaccccctggtttgagctttcggagagtggctcttgctcaagaatgacgaaggcacaggaagattcaacctggagaagcactgactttggaggaaaaggttctcttgtgttttgaatttctaaagacttttaatctattttttaaaaaatagcctttattttttagatcagttttaggttcacagcaaaattgagcagaaagtacgagatcccatctactctctgtgctcacacaagcacagcctcccccaccatcaacatcctgcaccaaaatctgcttcttagtctataaaaatggcatgtcatgattttgtttattaaaaataaaatcaaatattatagactgaaaactaagccttttttcttcacccctactcaacacacacacacacacacactcacacacacacacacacacacacacacaagcatatgtaagaatctatccacccaggagatcatcccacatatcctgaagtatccgatgcatcttcacctcgaagtccacggtgtcggtatacacatttccacctcgcgctgcagaacggtcacacaggattccattttcaggagagactataatttattcaaccaggccccctgtgatggacacagacgttgtttacagttttggtgctttttttttttttgtatgctgcttcaaaccggagtgcataaacatccttgtacatctgttcttacacgcttgtgagagtttatctgaaggatagcatgtagaaggagaatctatgaatttaaaatggacgtttatggatttttaacttttgatccatgttgcctactcactctctgcaaagactgtggctgtgtactctcctggcagcaggatgtgagagtcggtgggtcatgatcttcctgtgtatgaagagcggggctgggctagggctggggcagagttggggtgggcccctggcagcagagtctagccaatgcgtgggaggcatttggagggcatttttctcagtgctgccttgcactttcatgcacatgtatatatccatagaataatatgattctgtttaaatttcttttttaaagtcatgtatcgttctgcaacttgcttctttcgttcagtaagatatttggacacatttttctagttcagctgtagaattccacctcactgtttctatctgctgcgtagaactttctgcagtgtgagattgacttagccacccctccgtgggggttctgcttcagggaacatcctttgtgggtctcgtcaggcttgggtgccagcatccctctgtctgcaggaagcacatttattaggaaagtggtcattgctaagaacgacactgctgttattcctgccatgcacctggagcagaggttgtggttcttgccttggccttgggcttgggcctggcacttctctgagttttctcaagctccatgtgggtgcagtgaatctgctgactttgttcctggagctgagtggagatgctggctcagggcttctcctagctcagagagtggctgtgatgtgattcctagccccccttagtcatcctagcagactggattaggtgggccccccccatcctagtgatcctgaggcagatgcccccctgcccaggtgtgaacagactctgcctctgggtggaagattggcacaagccatgggatcacccatttatcttctagcgagatcttcctccaggtttaaaagagaccctgtagggcacctggtcctggctatgggtgtggtggttggaggtgataaggaaagaacttaggggctgctggtggccactgctgacagcttctgctaagggtgggaggcactggaagacttttgaatctgcagagtgtgggcaatcagggaaggcttcccggaagaggtgggactgggcccagtgggagttttagaatgaagaggcagtgtctctgggctccaaggcatcccctcggcaggggcaggggagggaaagcggggcatgcagagggcctggcaaaccttctttagagaggctctttggctacctgtggttgcaggatgaccacttgatgtccagaaagctactaaaggggagatttggaactggacagactgggctcaaaccctgactctgttgttaccagctgtgccagtcacttaccctctctgagcctcagttacctggtctgtaaaatgtgatgataacagttccttcttcacagggcaagtgggacggtggcttgagctcctgtttggagaactgttggcaccgacctgcaaaaggtgacaggtgtggtcacacctgaaggtaacccaatcacttgcgcctggagtgatggctagagttggccatggtgtctgggtgaggccagagacacttgcctagtagaaccccccagactcagtgatggacccaaggtgctggtgaaggcgacagaaatgatgcgatagattccctttcgctcttgggtcccaccccaggggcccacctcggggccctacctgcaaaaagcagtccctcagggacattggacaggtgaagaggctttgagggcatgacccaagttggaaggcgccctggagtacctggggagaaggaaagcctggccggctgatggcagagggtggtgggggtgacagccaagcttcaggcttggtgcttctctcagaaaatgccaccatagatgatgtccccaagcagcattgggtgtgtcctcatggcgccctttcttcctgggtaattaatggtgctctcatccccctgagagggtggtggtgggtatggcgggctggccgggcaggcgccgggcagacagtcagagcccactccagtcctcctcatccatttattacctgtcagctttgctctttctgaacataaaataagtgcctgggaggcggccagggcccctgaagccccgagctgggctgtctggggcactctggctccagggagtcattccctggaggcttctgctaagctcaccccactgaggggcttcagataagctgggacaaccaggctgtgggcacaggctgggttcctctgtgatgtgactgaggcaggtgggtggagatgcaggactggagaaggtcagggcctcggcagccagctagaggccagaatttgggttctgagacaaatcctcctcttttccctcaaacccccgcctctcagccagggcttcttaaccagggcttccgggacccagtgagtctcaggatggactccagagtgtccaagaactggaataggaaaaaaagaatcccactgttattttcaagaaccattaattagaattacaaatggtaattcctgcaattataaatgtagatgatcaaccacagtggcattagccattctatgatgttgcagaaatcataggaattgcagaaattctcatgtcctattattgtggacctgataataggacatgagatacccagttgtcatgggtatcctaaaataacatttttgttcaccgtacttcaaaattacaatagttattagccccagatcttgttctctaaggcattaataaagaagcacatatattgctatagcattaaaaatatttcgggaggtggaggcaggcagatcacaaggtcaggagtttgagaccagcatggccaacatggtgaaaccctgtctctactaaaaacacaaaaaattagccaggcatggtggcaggtgcctgtaagcccagctacttgggaggctgaggcaggagaattgcttgagcctgggaggtagaggttgtagtgagccaagactgtgccactgcactccagcctggtcaacagagcaagactccatctcataaaaaaattttttttttttttgataaccaggcatgcgccaccacacccggctaatttttgtatttttatttattaatttttaatttttatatatatttttgaatggagtcttgctctgttgcccaggctggagtgcagtgatgcaatcttggctcactgcaacctccgcctcccgggttcaagcaattctcctgcctcagcctcccgagtcgctgggattacaggtgtgcaccactacacccagctaattttggtatttttagtagagacagggtttcaccatgttggccaggctggtctcgaactcctgacattgggcaatccactcggcttggcctcccaaagtgctgggattacaggcatgagccaccatgcccggcctgttttatgtatttaaaaacatttttctgagagggggtccttagaccttactagagcccaaagggcccatggcatctaagaaaggtaaagggctcctgctgaggcccagggaggggccctcacaggctgggggctaccccatgctgacagggatgaggtgtctgactgtcaaatggactgaagtctgcactgggcaaggctgctctttgtacccatctctgtgctggcctttgggggacagcagctcctggtgagagaggaccttgcctcaaggagctcctggcctggttgcgggagggggcaaggcacacagacagctgaacagctccctgcactgtcaggagttcagaggaggagagagaagtcacttccaccactgggacctgattgaccatcctgggaaggcttcatggaggaggtggcattggatttgggccttgaaaattttgacgtaagagacaggggaaagcaggtcaggctgagagggaccagactaagcaaagaaatggagtccagaaggctggggcatgagtggtgcccagggaggagcagggttcaactggagggtacgggagagagcagagggaggtgggaatggaagtcctgaatgcaaggcaaagaagcttgcggcccgacgcggtggctcacacctgtaatcccagaactctgggaggccgaggctggcggataacaaggtcaagagatcgagaccatcctggcccaaatggtgaaaccccgtctctactaaaaatacaacaattagctgggcgtggtggcatgtgcctgtagccccagctacttgggaggctgagacaggagaatcgcttgaacccgggaggtggaggttgcagtgagctgagattgtgccactgcactccagcctggctacagggcaagactccgtctaaaaaaaaaaaaaaaaaaaaaaaaaagaagcttgcactctgctgttggcccagggaaccgtggcagggctttcagcagggagcagggcaggtttgggtttgaggacagaccccctggttggtgtgtggagagacgatgggagaggatgggcgggaggctgggtggccatcgttgacaccttgcagtcatctgatggggaatgtggagagctgaactgagcccagggtcctcgtggggagagacaggggccgtcccagccatggaatgaggtggaaggtcaggaggctcagacctctggggctgggactgaccgcctgggtttgaattgtggcctctgcgggttactagctgcgtggcctcgggcgtgtttgttacgcttgcgaattaatttgctcatctaagacgcacggtgatagcagcacctgtctcgcagagttgctgtgggcgtaaaatgtgacaagggatttaaagctcagcacagttcctggcacagagtaagctctggacacgccatagctctggttgtttattaccggtgataaaacagatgggtcctggtgacccagtggactggaggagatgcagggacaaacgcggccaagtctgaagtttcagatcaggaccaaagcccgggtctctgcagctggtatctgagcacagaccaggtctccaggtgctctcttccctgctgaccctaagggctggggccaggacaccccctcccctgccctcacctcctctgcccagctttcccttagcaaggcctcctctggcccctccagcatagactcccaccccccaggaagggtcaaacacaaactccatctcattccaacacctggtgccgtctaaccccgttcttttcctccaggagttcccagggtcgggaaggtgcagtgaatgagacaggcctcagagagtgacactgggagctccacttgggtttctaagtctcagagcaggaagtgtctagaccagcgtcccactgtgagtgagcgctggagcctccctgaagaggaatgcggtgggcaaggtggtgtgacaaaggtggggtctttgaacgtgggattttgcaggagcagcttcacctctgggcctgctcacactggggctgatacttggggtcctggaattccatatgcactttcccctagaccctttcggggggctccccaaccctgctcagcttccctctctcccagactgaggggttccagctgctccgggcagtgggagcccactgatgccggagaataaatttgctgttttgtagagcatgtggatgcatatttggggggcttaatcttcttaataaattgttctcaaattgtgcactattaaactcctgaaaaattcatgagcacgctgggaatagagacctcatcgggaaggtttgacatgaacaatacaataaacgcagcttctaaattgggtcagggaagccttcgaggcccagagagaggacattcccgcttgaccctccccaggcctataaattaatcatgtgcacaaagagggccttgttctctcttgtcagagccaggggttgtgtctttgcccactgaccccaccccccctaccaaaccacctctgctgcaaacagagtgcctggtgaggccgttcagcgtctgtgctttgttattcctgtgtctccaaagcaaggtgggtgtacgtttcagcaagagagatgtaggttagataggaggaagaacttcctggctgactgtggggtggtgtgaaatcctggaatgggctgctctgggaactcgaggagactcttttcattaggcttttaagacctggcaggctctatcccccttggtgctctcagaccattgcccagagacagcagtgaccaggacagacattgccccagggtttggccacaggagctggcctggatgtgcctcattctggaccgttgtgggagatttaaggctcagctaaggggacatcaggacagcatcctccaggcccaaaccctcaccatagtctaagtacatggcatttggataagggaagtcaagttaggtctctgccatgggtctggggctgctgctctcttcctcaacaccctcagcctcttggagtcctattcaaaggcttggcccagatgccacctcctctgtgaagcctttcttgatttctccctgccctgtcagtcaaaattagttacttcctcccttgtggtccctctgccttgggcccttgttcgagactctctgtggaagcctatgtgtcccaccagactgtcagctctctgaggacagggactgtgtcagagccctctcaggacacaaagggacacagttcttgaagggtcctccagagaccatgccatgacttgcattggttttcacatgccaactcctaggaagggtcccctatgcaccccggggtaggagctgaatggcctggcttcccaatgacaacatgggaatcctgtgcttttaagacaggagtagggccagaaagaggagagatggaggaggcagaggccccggccggccacacttgaccccgcctttactctcttagttctgacatttcacaagcctttgtttttttctgaatctgctcaaagtccttcaaccctgcaggtctttggaggagggtgaaatggccacccttagtgtacacaggagccccaccctgagccactgtggccccaggtgtccccttgtgcctagaaagcagcctcactccagcacaagcctgggcaggtgcagcctcggtgcgcagtttggaaggggtgacgcgcaggtctgagaatgggtgggcagtgggggtggagttcactgtcagcgccaaagaggaagtggggaggccctcgtgggagtgtggaagaggagcacctttctctggggagagcacttccgggagatgtaactgggtagcctacccagacccctggccctggtggtctagcctctaaaggaagcagatgatagcaataggagaaggcagtggacagccccattggtcctgcccccaccccagccaccacctgtggctaggctgggaggaagctgctcttccactcccaccctcaccccgtgggctcggctgctccctgctgacttgcacctcagaggcacccccagccccctcagccagaacagccaacaccaggcaggtttgatgcctgataccatggggccctgtgtgccagtgcggcccacccagcctcagacctgtgtatatgtgtgtgtgtgtgcgcgtgcgtgtgtatgtgtgtgtgcatgtgcgtgtatgtctatgtgcgaaggggaagcttggcagagggtggctatggagtggagggggctggagaggccaggcctccgtgtggccggtcaatgcctcaggaggtcagcaggtggagaaagagagccgtgtgtggggtcaaggagaccctggggctgttcattggacagcactaattcaatgcctaaaaataacctcggacctggtagggcacttcagaaatttccaggctctttcagaccccccacaaactcatttcagtctccaacatcttgtgaggaagttaattccatccttattttaccaccaggagcaccaagttctagagtaaatctgtgaagggctcacagttagttggtggtagagctgaaactggaactctggtctctctggccataggttcagggccacctcctgtggacctactgtgtgcttagccccgtgcagggcctgggcatggaaacggagtgaaggaggcactggctttgctgccaacatggcctgtctgcagggaagaaggccacctgagagagaggttaggaagcaccagggcaaccacaggaaggaggggcgctgagatgggagcgaggccttggacaagaaaggatatccagagctagagagggtggggcttgagggtggaggccattcaaacacaaagcactctgggtgaagacaagacagtggggagcgggttttggcccagccccacgcagagccttaaagacgcagccatgggcatcccctgcagggcctggcaggcagtctgcccaggagagtcacatttgtgggaccctgctgcagaggaccttcccaagggacagtcccctgtttagatgtcttttttgggggggggtctgggggatggagtcttgctctgtctccccaggctggagtgcagtggcacgatctcggctcactgcaacctctgcctcccaggttcaagtgattctcgtgtctcagcctcttgagtagctgggactacaggtacatgccaccatgcccagctaattttttgtatttttttttagtagagatgggttttgccatgttgcccaggctggtttcgagttcctgagctcaggcaaaccacctgcctcggcctcccaaagtgctaggattacaggcgtgagccacggtgcccagcctcagatgtcttttgggggtggaaccagggctgcactgcagaggtcacccccctacccctggccctgtcactctccatcctcttcctcctggccagacctcctgctctggcctgcttttattctccttttagcataagatggcaaagtgactgagaagaaggaaacaatcaaaggaagagaagtggttgccacggaaactataaagtggaagcagaaactttcaggagcaggagggaggagggaagcagacctggtggctgggtgggaggagaggcgggaggcctggcctgggctagcctggagtgcccctacgcccagttctcgctgctctccccagctgagcaacgctgggatctgtgctctcgggagcaggagggccgtctggtttctcccaagtctgggcaggaggtggctggtacgagagtgaggtaagcagcttggcctgtgggtgcatggggctgaggaggagccctgtcttctgcccagatccccacattgttctgaaccgccagtcccatgtcagcctggaggagtctttgcatgtctttacaccacgtcttgattcctccgttctaacaagccaaaatgacacggtgcaggactgggcagtttaccaggcagcttcctgagtgcagtctcattcaagtcttgtgacagttctgggaggatagtattcagattctacagagtggggagtttgggcccagagaggttagggaacttgccctaggtcacagagctgagaacccccaggggtaggatttatcccctggactgtcagatcctaaagccttgagctctcttttccttctggacactttgttttgtaatgcagggctctgcatgaagccatgagttctctgtagcctccagccccttctcatccttcattccagtaagactttcccccagggagctgctatttgcttcctggaggagcctagggaaatttagtgtctctgaggcttgatttccccatctgcaaaatgggcataatagcaccttttccctctgaaggcttttgtgaggatgcaatgagacaattcaagtcaagcactgggtgcagtgcctggcacagaggatacccttgaactctctgctggctgagcctagcaagcacccgtggagtgggcagggctggggcaacctccctatatttcagagaagccacttcgtccgtgaaacggttccgatgggttcctgccttgctcggggaattggaaaggtagattgagatcatggctgtggagccttgaaaccactgagtctggtgggggaagaagcagggtctcccctgctgtaaaactggccactagagctccagtggacattgagacgtctcagccaatggtctctctgttggaggaagggaggggagagggattgggaccctgcccagttagcccctgagtaggaggctcagacctgctgaaggtttgggtctgaaatgaccccttggaattccgcgttgcctgcccccgaattgcagccaagctttagatttctcccgggagaggcccagccagtcaaatgtattattaaatggcagagaggccgagcgctgcatgtgaaagataatgggggaatttatatgatgggctataaatcacagaatgagaagccctgcaacctgtggggaggaaaattaagaagtcctgagcagtgacttgtttggggtgggggcggaaggcatttggccctgttttgctgtgagcctggcaggttcatgatgcacgaggcccaggggtccgaggggctctgatgtgcacacttcctatgtactcaatggtgacacccccctccccccattggcagctgctgtgtgacaatgccaagctgggcactgggttatgacctcagggagagcagtgtgccaggagagacagatgtgagatgaatcatcaaaaaatatgcagtcggccctccgaatctatgggttctgcatctgtggattcaaccaaccaaggattgaagatagaaaaaaattgcatctgtactgaacatgtacagactttttcttgtcatcattacctaaacaatacaactatctccatagcatttacattgtattagctataagtattctagagatgatttaaagtatacaggagggtatgcatatgctatattttaatgtcagggacttgagcgtgcttggattttggtatctgattggattttggtatcctggatccaatacccctgggataccgagagacgcctgtatggcactgcacaaagcagtgggctccctggaggaaaggcgcagggagctcagagagagtgttgcaggagggctgtggaggaggcggtgaattgagagaggggagtggtggtttttctggaaaggaagagtgaatgcgagtcagccaggtggctcaagagagctgtggcagggaaggtgagccagaaagagtggccaaaggccagcagggccagggcagctagggcaggggctgtgtttcagatttcactctggctgttttatggagaaccacactgaggaggcagcggaggatttggggggacagttcggggggatggaggtccccaaaggtagagatggcgatgccctggttctgggagatgtcaatgaaggtgatgaggtggacagcctcaagctggaatttggagctctgaagagcccatttcacagagcaggctccaagtctacaaagccagccccatgtcctgtatcctaggaggtgggaatcatgggagcaaagacacaaaggaaagaagcagtgaagggctgggggccagggtggttggggaagggataggagtagggtgtggtaagagggaagataggagtagggctggggccatatccactgaccactatcctaggctaggactagagtcaaggctgtgtgggattgaatcctgtctctgccactaatcaactcttgtgcctgtaaaatgggagagtaacaggattcactgcttttggtcattagaaggacttgctgaattgacactgcctgacaaaggggaagcactgaattgggattaagtatgcactgagtggccttgggcaactctgccctctctgagctttgctttcttctagcaggtctctgcaaaccctctaggccaaagtcctctaatctccctgtgctagcagtgtgcagctcccgagggtggtcagagcacagcggcaagctggctgtattgcctcagatgggaccgtgtccctctctgccctgtaaggggataccatgcctatcagagctgtaaggggatattttaatcagcccaggacctgctgaggtcagagggcatagggaccagaacaaagaatgccagtcacggctgctgcctggccctagatgacctgctgggccccagaatccagaccacatggggagcctgcggagggaggtggaagctgggggcctcactgtgggtcaggcactgttcaaactgggtgttctccattttgggcctcagtttgcccatctgtaccatgaggtttataacccctccctgcctgcagcacatggggtgctgaaaaaaaggaacaggctgcagtttggacaaagcagattcaggtctttattgggggctgtggtctcaaagcctgagagagagcaacaggtgggcgagtgaggctcagtgcggcccacggatgacctgctttggaatcacctgtgggaccactgcccgctgatgaaaaatgcagactcctgggctgttccccagactggctaacttagactctgcccggtgggcccaagtgtctgcactttaacccacatcccaggggactggaatgtctcgaagtccaagatctgaagttctgggcatccccttccttgcatcaggggaacaggggcccagagggcatggggtcggctggcccaagttgcttaggagactggaatcctatgccatgccactcaggggtccttcctgtgcatcgccccaggagccctgggagtcctgggtgatgcctggggcaaggggtactttatcctagggctccatagcccagcagggggcagcgcagatcagcacctgctgagggctccccgctgctgtgtgggcctgggctgggtagtgcggatctagaaagagctcactgttccggagaggtaggtgtgggcctgggtgggaagacgggcctgtgtgtgcatgggagcctgtgtcaggggggcgacaatgagagagagagcaccaggaggacacaagaaatgcgacatcagagaaagcaggcccagaacattgtgaaacttccttacagcttcccgggacagaggctgcaggggaagaggagagggcatctgttgcccaagctgcctccctaggactgtcagtgggattggggtgacttcaggcctccccacctccccccacaccatgtcctctgggcttttaaatgaggatcaatcagaggtcagcccctccccaagttcagcatcagagtcaggagggactaggggctgggctacaggctaaactccagccccaactctccaactggcccttccttactttgcctgctacagcttcctctgctgctgggaacctgtgggcaggcctacggcgtggggtggggccagtcctgagcctctggacctctgacttgagagtgggctgaccactagatctcttgaggccttctgcagttcccagttgtgggaaggcagcttcactttcatactttctcagggcaatggggggctggtttggtagtgagctccctgtcaccaaaggtatgctagacaagactaggtgaatttttcttcctcttaagcctttggtgacaggctaaagggtgggtcctgggccatcccctctttataccccatctgtctgttaatcattaattgccaagagagctcctcctgggatggggtgactccttggctatgggggatgctgatatccaggatgaccttgaacttgtttttcttggccccaaactttctgctacttcctgtttgagcaggtgcagaaattataggggcccaacccttccttgttttcctggtagaatttccagacaaaatgctcttcccaggatgggggcagagctgggattgttctcactcccaaggggatttgaggaatgaggatggcagaagctccatttaattcccacctacctggtcttaggatgctagctatgggctaggtgggatcctcaggaaaggccagtaaatgtgagaaccgtggctctggcagtgcttgcctctcctctaacaccagctatggctcccatttatgttccagattggacacagaggctctgagtgtcaatacccaatggccttgaacacccacccaggccaaccccattttgtaggaggggaggctggggctgtgagccagaggagccttgttcaaaggcacacagcaaagtgaaggcatttattcatccattcattcattcaccgagtgcaatctctgtgccagttccttcacggtcaggatttgcaccctggcctgctgaccatcctcagctgccactcaaaaataaactttccagcctgccatccatgtgtcacaccaggcctcaagaggtaggtcacttgttcctggtcccacagccagcctgcctgcctgcctgcctgcctgcctgcctaccttccttctttccttcttccttcctctttctttcttttctttctttctttttctttctttcttttctttctttctttctgtccatttctttccctttctttctttctttctttctttctttctttctttctttctttctctctttctttcctttctttctttctctctctctctttctttctttctttctttcctttctctctctctctctctctctctctctctctctctctttctttctttctttctttctttctttctttctttctttctttctttctttctcactttctttttttttgacagggtcttcctctgttgcccaggctggagtagagtgacacgatcatagctcactgtagcctcaacctccctggctcaagcaatcctctcacctcatcctcccaagtagctgggactacaggcacacaccaccatgcctggctaattattattattgagactgagtctcactctgtcgcccaggctggagtgcagtcgtgcaatctcagctcactgcaacctctgcctcccgggctcaagcaattctcgtgtgtcggcttccagatgggatttcaccattgctggccaggctggtctcaaactcctgatctcaggtgatccacccacctcagcctcccaaagtgctgcaattacaggcgtgagccaccacacctggcttttttttctttttttttttttttttgtagagacagggtctcactgtgttgccagggctggtctcaaactcctgggctcaagtgatcttcctctcttggccttccaaagtgctggaaccacagcttcttttctattaaaaaaaaaaaaaaaaaaaagaacaggggctttgagcccagctcccttcatgcacctcgttcatcacacatttattgagtgctattctatgcactgggcatatggctgtgaactggactcacaaggttcctgtcctcattaaagtctggggaaacaaattaatgaacatctgaatacacagattagatagtttcaggaagcgctatgtggaagaaaataaaacagggcaatgggatatcatggagagattggggcaaaggcacttgagataaggggtccagggaaggtctctgagggtgtgatatttgagctgaggcctgaatgacaggaaggagctgtccatctgaagatctggggtttgtgggaatgaggcagcaggaactggagatgcaaacgccctgaggtgggaccacgtttggcacattcagagattgaaaagttatcaagctgagtccagaactatcttagccagtggctcctcaagaaagccactagaaagctcttttaagaatatagattccttggccctacccatcaaaatctggattcagggatgctgggagtggggccctggaatctgtttctgaatgctcccaatgtagttaatggcatccagtccagccccacacctgtaagcctgccatatggagccatccccttctttcattttttgcagagggaggatcagagaggcaccgtgacttattcaaggttgcacagccacacagtgacaaatctaagcctcaagcccagatctcccaccagagttctgcccttaccacttctcttcttcccctctggagaagctgcctgggcctcaccccaacttggttctatctccctgtctattctccctgatctcacccctcacatagcctgctccccagtcctcactgtatcctctgctccagcctcaccatcctacccactgtctccagtacatgctttgttcatttccacctctggggcttttctcatgctgtctctccctccaagaatatacttttctgctcgctatgcagtcaactcctactcagccgtctagctccatgccagtgtctcctcctccaggcagtcttccaggacttctctcttctccaaattctctcagtgctgactccaggtcagataggctcagccacttttttcgaatgttgccatcatctctcccactgttgctaagagcctgctctgggctgggagctgtactgatcagctctggactgtcctctcaaccaatccacaaattagtgagaaaagaaatagccaaggctaggcatggtggctcaaacctataatcccagtgctttgggacaataaggtgggagaatcacttaaggccaggagttcgagaccagtctgagcatcatggcaagactgtgtctctaccaaaaagttaaaaaattagccaggcatggtggcacacacgcctgtagtcctagctgctcgggaggctgaggcaggagggtcacatgagcccaggcattcgaggtcgcagtgagctataatcccaccactgcatttcagcctgggcaacagagcgagaccttgtctaaaaaagaagaagaagaggaggaggaagaagaggaagaagaggaagaggaaggggaaggggaagaggaaggaaacaaggaaggaaggagaaaggagggaaggaaggaaagagaaagaaggaaagaaagaaaagaaaggaaagaaaggctgggcgcagtggctcatgcctgtaatcccagcacttggggaggctgaggcaggtggatcacctgaggtcaggcgttcgagaccagcctggccaacatggcgaaaccccgtctctactaaaaatacaaaaattagccaggcgtggtgacacacgcctgtaatcccagttactcaagaggctgaggcaggagaattgtttgaacctgggaggcggaggttgcagtgagctgagatcgagccattgcacttcagcctgggcttgctgagactccatctcaaaaaaaaataaaaaataaaaaaagagagagagagaaagagagaaaagaaaagaaaaagaaaagagccaggaggggaagctgcttgtcagtttatacgcaaggctttgatccactatgttatttgactcttccacaacctcacaaaatattcatatacccctttataccttaggaaatggaggcacagagaggtgaggcagtgatctggggtcacacagtgaagaggggaaggctcatcactccaaatcccccacctgaatgggggcttcctaggagctgactacagggcccgttcagctgtcctcctctgtggtctctgcaggagttgagcaaggccctcccctggaacccaggccagtgccagccatgaaatggttcacagatgaccaggcaggcctgcttgagaagggagggggctccctgacctcacactgggaccatatgccaccccctctggtttcccagtgggtgcggagctgtctgggcccttactgaagggggaggaagaagcccagagacctggaacctcagccccaggcctgggccagggagaaaggaggggctgtgggcgtcactggggcccagggcccacctggagcttggcagcgtttctgggtcagggcagggagaggaagtacacagagagagtggctccaggcttggccatctgggctgaaatgccggctgctagggttggggtgaggaaggagggctggggctggggcctggagagtggattagtctcccctgggccacaggattggagccctcaacttcagggcagccagtatggaggggaagcccagggctcctgtgggcagaaggcagcaggcattctgggagaggtggtccaggctctcgacggagagaggtggtcttggcggctgtatttgggttccaaggtggaacccaccctaatccccagccccatgtgaccttgggtgagtcgctccctcccttggtctcacttccccatcttcaggaagggatgctgccccaccctgactgctctgtgctgggatgagagagccaaccagaccctcagtgattgcagagttgatgccagatcccagtttgccatgggttagggagggtcctctgggtaagcagctgattttgagggcctcagcttcccccgttcatcagtttctctcaaggttccttctacctcggacattccggggctttatgacaggctgtcgacgtgtacgagggagacgtgcatgtcctcttctctgggcttctggaggactggaggggacctgtaggtggccctttggggaatggggagatttttagatcctgatggaatctctgggaggtgagctgaacagagctgtctcatctccatttaacacgtggaaacctgagacccagaggtatcacacggtgaccccctcttagagttccggcctgtcccgagggctctgccctcggcccagccctgggtgacttgattggaaaaacactcacactccccgaggctctgtctctgtgtgttcaaatgtccacgcttgactggtcccccacttccgcctgtgttgagaggggcagagccatccaagcctggggtcatcttgtccctgactgcaccgttttctgcaaacgatgtcattaaatatatcggtggcttttgggaggaagtctggggggcggtggcagtggtggtcgcctggctagcctggagtgctttagtgtgacctcttggggcttgtctatgcttttccctgaatggggtgacctggccccagcctcccccatcttcctagtgaagatcctgctcctggtccagccttattcccggatgaacagtggatgcaggaagtcgtcattgcctgccagacaggccacctcctggggcagaggccatgaccttaaccacaagtgtcccgccaccccccccaccccgaccctctgtcccccccacccccacccctgcccagagctccagagactgaaaggttgagactgtcctgggaggcggatgtgtgcaggcctgcctggctggggacttccccggtcaccaccacccaccctcatcccaacaggaaacctgacaggtctgagccttccagacacccattgtgtggggcctagtgtgggctccgatgcttcccctgtcaggactcctgtcgcccctagcctcctcctgtcccttgacaaagctggctattaaagaaagttctagactgtttccactcccccgtctctgcattccgtactgctcaaccttatgatcgttgctcctttcagccccctgggttcaaatcctgcctcctagtgcaagccctgtgactttagggaactcacctaccctctctctgcctcttgacatttcttctggaaaaagaaataaccatctgcctcctaggattattctgaaattaaatgagatgatgtgggtagaatgctgagaacaggatctgggacagtgcatgctagatgcagttcagctaccatgattaggattaaacccaaactccaccctcaaacaaacctcttgaggtcaaacttgtaaccctcctctgttaagaagccttgggtttctgtggtgccccacgcatgagcatctccccttccctgggggaggctggtgtttgaagataactggttgtggttgctgttatcatcccccctgtacagaatggcccatcaatgaaggctgtgctcttctgttttgtgcttagctgcagaaatgggtgatctgtcttaagattggaggaaacactatgctttatgggcaatttaaggcttttcaaaggtaattttggcaatatgcttttttttctctcttttctcactgacttcaaccctgacaccgcagagggactcaagactgccttgggctagcctccctcccctgcatctggtgcccctgctgacccaccctggcctggcccatgatgtacctggactttcagcccagctctgatgctacccactgcttcttttccagcagggatgctgatggttttctgcctagaggggaattttttgggtccatccctccctggtcttcacaagtagcctcctgtgtccccattattcaaactgactagtggggtataccaggagccaggaggggggtgtctctccttggagtcagagtagacttttttaaggagggggtgcttcaatttgcaattgcaaaaatgtatatatacacacacatatatatacataaacacacatatatacgtatatatacccatatatacacatatatatacatacatatacatatatattatatatatacatacatatacgtattatatatatatacgggtatatatgtatatatatgatggaatactactccgccatacaaaggaatgaattaatggcattcccagaaacctggatgggaattggagaatattattctaagtgaagtaactcaggaaaggaaaaccaaacatcatatattctcactcataagtgggagctaagctatgaggatgcaaaggcagaaaaatgacacaatggactttggggactcagggaacgggtggaaagggggtgaaggataaaagactacaaattgggtttagtgtatcccaagttactgctcgggatatgggtgcaccaaaatctcacaaatcaccactgaagaacttactcatgtaaccaaatgccaactgttccccaaaaacctatggaaataaaaaatttaaaaaataaaaaactgaggggatgcttgagctgggtcctgaagggtaagcaggaatgcaccaggtgggtgcagagggaagaccttggtggcagcggtccaggtcccaccaacagggcgaagactggtggtgggaaagagtgtctggaggatgaccaagggggctgaaatgggttggggtgcaagcgggaggtggtcgctttttgacacagcttggtctctgagagttcgccttgggaggcttttgaggggagggtaaaggtgctggtggtggggttaggtcagatctgatttagccagtcctagtacccacacccctacttactaaacttgcatgtttccaggccccatccagacccactgaattgagcgtcttgagggaaactcagaaatatgcctgttcactgagtgaaggtgatttgggggctgcagccctgtccccgctaaagcagcacatgggagaggtgggagctgggcctattcaggagcccctctggaggtgggagaataagaccagacctttagccctgtaggtactgaggctctcatgttggcagggctggaaagtccgatctgttggtctgtcacaggaagcagtggtagcaatggtggtggtgggcactggaagcagggcttctcctgttcagagagagaaagccacaggggcgccggcgggaggtgggagcagatggggggccagtttcccagcaggattgattccaggtcccctgctgggctgtacagggagcggcctttaactgccctgttcctgggccaggaagaaggaaaaggagcctgggctctttctctcctagctcctgccctgcccccttcccactcagtacccggagagtacctgccccaggcccgtggagatgctcggctcagctggttggcgatgcccattcccatcccaagggtagaaatgcacaagcttcctccatttcactagctgaccctccttcctccacaaggcagatggattgggggtccatacgttctccctataggtagggaaactaaggcacagagaaggacttgaaaagctgaagtggggagaccatgccagacctttggagcccagctgtgcttacagatgaggtcctgagttccaagttactgccccctctcccctccacacacactcctcagacttcctgttgggggcccaggctaagaccacttgcccacaccactgataacagtgagttgattgtgagcctcccgtcccctccagggagggctggaacctggctgatcagagggttcctgctttgggaaacaaaatgggccagatgaactcaggccctgggagcaggaccgttgcccccgtcctgagtaggacttcctgggagtccctcacccccagaacccgtggacctggctacggaggttagtcatgcctggaagtgccaagatgtggacaggtggtgctcagaaccccacctacgtgaggaggcactgaactgggttctggcagtttggccagaggaggatgcatgctaacaaggcccccagcttgcctggggactgagtgactgtgtgtgcgctctgtccaggggcttctttttagagacgttcctgcaccatgtctgctgttgaaaggagatagggcaatgcctccaagcttgtctgacctgcagcctaccggctgcatgtggcccaggatggctttgaatgctgcccaacacaaattcataaactttcttaaagcatgatgaggtttttttgtgtgtgtggtttttttgtttgtttgtttgttttagctcatcagctatggttagtgtgagtatattttatgtgtggcctgacaattcttcttcttccagtgtggcccagggaagccaaaagattgggcacccctggcctaacccaaaggaggctaagggtgtcctcttgggcaccctggttttccatcttcctgtgggattggccagtattcagggaagaggggaccagggcagctgatagctctggactcctcagactgagtttgctggagtaacacccctcctgcccctcccccctggtcagggaaggcgcctggcttccagctgtgagacaggctccgcaggactagggaccctccccgctggctgagagcgctagggagggggcttcccctgtgaggtgcaaaacccggcctggatttctgcccagacggccccgcccactccagggccccaccttccccactgttctggaggaagatcccctagccggcctcaggcacttgcggtgactcacaccccccacccctaagtctgaatgttgagagccccaggctaagaccacttgcctctgccactttccatgtgactgaggcaagacctccttgccaaggcctcagtttccccctctgtacttcaaaggaggcagctcaggcaggtgtcttaataatttaaacgacgaatattgctaaagagataaggggcggggagagagagagatcactgtgggccatggttagggaagggtggaggagctgggtcctgaaagggtggactttggtcgggtggagaaaatagccaagaaggcagtccctgctggcagcacagcaaagagaagtgagaattagggggagcagaggtgaggctggaggggactttggttggggcaagattatttggggtccaaataacaaggatgtttagacgtattgccattgtgctctggggagccacggaaagctcttgagctgaggagtgacttggagaaagtttttcagccaatgcaatagagggagttggtacctttccttctgccaccctgagtttctggtgcctacggtagggtagggattgttctgccctgccttcagtgctttgagtgcttgaaacagacaccgtaattttaattacataaaaatgatacgtgtatcagacgggacaacctttaaaacgtaaagaagaggcaagtatcctgcatcacaggggagtctttcaacctggctgggccagggcctgcggagcagtgagggtcgtttctcagcccagcgagcctggggcaggaacggaccctaattgaaggtgaccgtccccaagcatgcgtcctaccccgggctccggagagcgcacaagcaggtgtgcaccgtctacccgcgctggcgggattgggtgcctggtgcgccctcaggtcgacggtcgaaccctcgggggcgggggtgggagccagaaccctcgggacgacccgtctggggtcccggggaaactccgggccgcctcgccccgccgattccaggccgggatttctcccgcactgactttccgggccggtgccagcccggcctccgggtccccagcccccgccgcggggccggctgctcggggagcgggagggggcaggaggcggaggaggagtttgagcgactttgtggggcagccagggcctcggcggccgctcgggcgagcgcgggagaacgcgtgggcgcccgccgggctgtccggagcggccgatggggcccgtgtgagcgcgcccaggcccggcccggtgcccggcgggcggcagcatgtccgcgggcggcagcgccaggaagagcaccgggaggtcctcctactactaccggctgctgaggcggccccggctgcagcgacagaggagccgctcccgcagccggacccggcctgccaggggtaggcgccaccccgacccctgacccctagaccctcctaaggccactaagccacctgatgccctgggatgctagggaccgggatcctccttccagccatttgccgggggtttcctcatccgccccttcctgagtctgccggaccccccattcccccagcttctgcttagtcctcctctcgccgggggaagccgaggctctagggtctcctcttaagccagggacagggagaggggagcctggaatctttctccgcatctcagatcagacctcctaccccactgtgcctcagtttactcagcagccgggcaataaagtaacccagggtggatctgagctttcccacaccttgccttcccagcccaggccgcggacttctttcttccctttccaggaacttaacgggctccccacctcttgggtgctaggacaagtgggtggacctcagggaaggaaccgtgacccctcgagcgggtgggcgccagctcctttgcaaagtttctctccatcaagctcaggaggcaggacgagacggagggggaggtgcgagcagcattttctttttccagtaacaggatcctcggctggaaatgcgtgtgatcccgggggctgcgtttgggcgggtggtggccgggacttccttccctggctgagtaggagggagggaagcccctgggaggaggaggccttcaaaggggctctggggaggctggagtcctaggcagaggttcaggcccaccgagggtgcccgtggggtggaagggaggagaaagacggcgccttagcagggacctgggccgagttgacaccatcaggttatcttgaaagtgggaagccgggccctgtgccaacaaatgccatgcagggaatctggtagaccaagaggggccacattcccaccctgcaggctgccgttgtgtgacctgggctgagctgcctctgaacttcagttttcttgtcggtgtgagggtaaatgaagcaggcaggtagtgttcggttgcttccaccagaatggggaagacttttcccacagtcaggtctgagtagcactgtgcagtccagggcttcctcaggaagtagtgagttccctgtgcacagaagggttcaagctgaggctaagtgtgtgcacaggtgtgtgctggtagttcagtcctcaagggtctctcaaagcctgcaatccccccactcctgcctttcctgaagtcttagtaagtacagaattaacagtactaagttacttagtaagtacagaattaacagtactaagcctttagtactccttggagggagtactaagcctttagtactccttggagggagtactaagcctttagtactccttggagggagtactaagcctttagtactccttggagggagtactaaagacctggggaaggctttatctcagtggttcaggttttggttcttctatctctgtccttctatttaattctgtacttgctaagacctggagaaaggcttagtactgttaattctgtacttactcccttcccctggacttggtctgggagaccgggaatctgggctcaagctttgtgactttgggcaagtcatttcccctttctgagcttagttttcctggttgtaaaatggacctgccgtatgtggaggattcagtgaagaaactgagaaatgggagctttgaaaatgcccagtactgttcagaccaccctggggcctctccttctgcacccacctcacgtcacctcacccacccgcccctcctttgcctcagaaatgccctgtgtgaccttttcctcttctcacctcagcccagttccatccctgactgtaatgggagtctcgctcctgttcagctgacctcctgctcagctgaccaggcaggggataatcaatgtgtcaggggctgtcacctgagccccagctcccagaccccacatacacaggatcactgcttgtgtcccagcttgaaggagctcacggcctgcagagcggggaggagactgtctctgaacagaagttatatctggggagatcagggagagcttcacagaggaggtgacatttggatgggatctcacaaaatggatagggtttcccttcgcagagggagtaattgagtcagatctgggttcaagtctcagctgtgcacacaactattctacagccagttacctctccaagcctcagtgaccttgtgtggtcaatggggctagcagtgacagggtcatgtgagggccagaagccagtgcctgggactaaggctgcagctgagggtgagctactgtcttctctctggacagaatgaacagactgcgcagtcagggagaaggaaaacggcttgggtattgagaatagagttcctcctgggtttggggaggggagtggattgggaagggggctgggtgagtgggtggggaagagcaggcaacagtagtttggatttgataaagggccttgaactttgggaggccaaggcaggaggaatccttgagcccaggagttcaagaccagcctgggcaacatagcaagaccctgtctcaatattgtttttgtttgtttgtttgtttgtttttttaaaaaaagaaggcctggagtgatgaggagttagttacagctgcagccagggtgtagggtggaggctggaggcaccctgtcctcctcctccttggtgggaggcagctagggcagccattgccctccctccactaaagcctcagacgcctgactctaccccagagccacaaccaccacctgagggcagggccccacccagggagaaactcaggctgaggaagccaccctgtggcctttgagccagtcccttctgaccttgaacttcagcctccccatccacatgggggcttggtcccatggtgtggtagcatcggacctcagaggagtgggtggtgcctagcatctcagcctggatcagactcttgcccccacaccctttctggcctctggcactagcagggaaggaaaatgaccaagaactcaggctgtgtatttgttcagaaacagaaaaatgcaaggaagagttggttgctgccaggttctgcaggtggccaggctgggggaagggagcagggctttgtccctggtagggctgtgagtgagggacagtatctgcagtctccctagtttgaccaataagggacttaggttcttcccttttctgggcttcagtttccccatctgaaggatgggcagagtgagacctgctgtggtggggggtagagcacgaagctggagggtagctggaggtggggtagaaacagtgaccttcggagggtgagggccatttgcattttcccactgtgtccctaactccacttgaaggctgggcatgtcccatggatttggggggatcctttccccagaagggtatcatcagcaaggtgcctccccacctagtcacaccaaaatcaagaaaagttttgtctctgacccctgtgtttccccagggctgctaggagaaacagaaattttcctctagccctggataaagttctgacccattcattcagccagtcagctcctcttaagcacctactatgtgctgggcttcagcttgggtgcaggggcacatggagatgaatcacatgtgctcccagcccttgccaagcccccagtctgttggggaggccagcttgttggggtgcactagggcacaagtctctttctaggggacagagcagtggttagtgggaggcaggggctgtagttccagctcagccgcggactggttgcatgactgggcacatcatagggcctcagtttccccatctgtcgaggggggttaatcttgctctcctgcctcttggaatgcctatacccatagccatgaggggttttgattatgttgttcatgttttcatctgagtttttctaggggtccagccacctgccaggccctggctgggagctgggggttttgcagatgtttttctcttgagatggtcaggtcctcctccgtgcctgtacacacccctcttgcatgcctctgtatcttgcccgcgtggtgggagaggatggtttcatacaactggttcctaaccaagagaacagttaggtaaggacctgtgtgccaccatggggggtgggtaacttctcaggggaccctggctttttttttttttgagacggagttttgcttttgttacccaggctggagtgcaatggcgcgatctcagctcaccgcaacctctgcctcccgggttcaagcgattctcctgcctcagcctcccgagtagctgggattacaggcatgcaccaccacacccggctaattttgtattttcagtagagacggggtttctccatgttggtcaggctggtctcgaactcccagcctcaggtgatacacccgcctcggcctcccaaagtgctgggattacaggcatgagccaccgtgcctggctgggaccctggctttgataaggtctgcaagaggcctctggggcaacagcttggacttcatgagttgggcgagcctgagaacagccctgaggtgggggggttttgtggttccccagttttcaaatgttccctgcaagggccctaggcctggctctctgcctccaccttggatgacacctgtgaaatcattatgcccttttctgccttgtctcttcttctgtttctgccaagacacaatctttcatttggggcttggccctagcctttccagtccctcctctcccttacatacctcaaggattggggagctcactccctctcaggttgtgtaatgagggtgaaaatggctcctttttgttacggctcctgtgtgctgcgtgcctgctccatgcctggcaatgagctcaactctgaacttgccttgtcttatgcagtgttcagaacaacactgtgagatggatactgatactatcctcatttcataggtgaggagactgtagcccagagaatgaaagctttgcccaaagccacacagctcagaaatggtggagcccagctctgcccacctccaggtcctgagattcaccttgcgatatccgtgggcaggcagacctttctaaggtcaggccctggctttgagaaggccacctcccttcacagccaatgacttcactgggtgttcatggcaattgtctctcacagtcttggtcaaagcttgggagggaggcaggggagtggccccgttggcatctggttgcctcctccacctgcctgggatagctcaggtgggacctccccggcctgcccctgccccctggatcctgctgtcattcatgacctgccaaccatgccctttcccagggcatgcgacaggtctcagggcctcagccatgtttctccaccaaagcccttagtgctgagggttcagagtcccctggtgtgaggtccctggagcctggcagacacctgaggcctaatccccagagctctctaggtcctcgaaggaggccacaggccccagtgaatctgctggaatgtcagcctcttgcccttgcctttgtccttcctgacccaccctcatcatctttaataatcaggaagagaacagctccctttcaccaagctgaatgtgtgcccggccccatgccaagagctccccctgattacctcatgtctcatctcagttctccaatcctcctagcaggtaggggttattgttgtcactttcctttaccaggtgggaaacggagctctgggtgtgatatttcctctgcattttcctgtcggggtggtgaaataactggtttgaacccagtccactggactcgaaagctcatgctcagaagccccagggctccctctaactttcttggttgctgcaactcagagagcgctggaatggacccagggcatgctcctcatctcagcggttcaggttttcattcttctatctccatccttctatttaattctgtacttactaagacctgggggtacagggaggggcttggagcctatttgcccagctgctgaatggggaggttggagagatggatacttatggctccagtaccaggagccaactgtttcccttgacaactggggaaactgaggcccacagagccaaggccacttgcccgtggttacctaaagatgttaacgagaaatccgggtctggaactcagatccctttgtatcctgtttcggtgttggtgtagtttgttgctttccctaagatgagcccagatagggaaactgaagtgcctgggctcctggttgggtcttctgcggggagagaatggcgattcaactcccgtgtactgttgaacttgacacaaacacgctcacatcccaggctgcatacgtgttttgctttagaaatgacatgaagccttttgactatttttaagagaaaggcaatggctgtgatatttcccctgcacctccctctcggggccacttggttaaatgtcaggaaagggagagtatttcctggtcaggaacattcagagcttgctgggagctgaagttttgttttccattaagtaggtattcggggagtctatttccctctgcctcctctgtttccctggaagcttgcgcttgacagttgcagggaggaggggtttgagaatgagcagccgagatgcccacgtatcgcgtgcccgctctaggagtggcggggtggctatttttagccatcccgattcagtagaggcatttcagcgtttgttcaatatttaattatccatctgaaattggcccatgtggccttcagtttggaagcagctctctgtgctgtgatttcccagttgcataaataaggaagcaagggaatctcaatagccctccaaataataataacgagaaaaaaaagtagactcgatactcagcaaagacaggcttggttcctcggtctagacagaccacctgtatgttagcagagaagcaccaccgaggacgcccatcacgcccttggaaatgcggcggtgctcagtctccgaatctcagatccacaactgcctgggttttattggggatgggttttcctcccttcgccaggttcctgtgttgactttgacagctgctgggtacctgagaggtggtttggggattttgcttttggaagccttgttagcttttatttccctcttctcttctccctgacagacaggagagtactatcggcatctgggctgtgctatttctttttccttggcctttggaggcgatgtgccgacatagttgtgaaatgaaaaaaggcagagcacagggagggagatgttggggccatgaggctctgccttccttccccaagcccctggctgatgagggagagaggggagaagaggagagagtggggcccaagggtgctgggcagtcggagatgactccttcctactgtcctgcttggcatggagatttgtggactttgggttcggagactggaaaccaataaattggtaatctggaataagcttggtttttctatccatttacacctctattctggggacacagagtttggcctaggagcgtgtacagagtcctgactaggtcataaatgctgtgtgactgcagacaagtcactgaacatctctgggctcagaagcacatgtaacagatagatatgatgcagcatagggtgtcattataggccaggagaattgtcattattagctgttcacccaaagtctgaggggttgcttgcaaatcagttagggctgatctagaaagaaaacgtttgggaggccgaggtgggcggatcacgaggtcaggagatcgagaccatcctggctaacacggtgaaaccccgtctctactaaaaatacaaaaaaattagccgggcgtggtggcaggctcctgtagtcccagctacttgggaggctgaggcaggagaatggcatgaacccgggaggctgagcttgcagtgagccgagatcgcgccactgcactccagcctgggtgacagagcgagattccgtctcaaaaaaagaaaaaagaaaagaaaaagaaagaaaacgtgatgccagtggggactggacccacctaggtggtttctcggcatccctaccctgagaggctgccacaggtctcactggtacttgttcagagcagcagagctttagcgagccacctagtatgtgtgacctgggtgccaggggctgccacagcagatatagccagcccccgccctcgggagctcagaggccaaggggaagagtcttggcataaggttagcagatggtgtgactggaaaggtaggcagggccttgagtggtgagcaaagaggggagaacagcccctggcagaccactgggaatcaaaggaaggattttgaaaataacaggaatgataacagtgatctccatgtcttgagcacttacacagcaccaggggttcttctaagtcctttacatgcatcctgccttaaatcatcattctcccaggtggtgttatcagctccactttctagatgagaaaactgaggctcagactggttaagtgacttgctgagcatcacccagctactgagtggcagagtccaggatgtttaaccctcactatacttaccagagctgtgatttaggaaaagaactcttaacaaccctcaagctagactggtatggtgcagggagaagaaagtgggaagagggagcagggaggccagtccgcttcctggggaattttgaaggaggccggcaggtgcaggatgggggaaggcagagggcaggtggagaggagctgggaagtttggaagggctgacacaggagagaggatgccgccatctgagggccagtgctgggctcctgccacgatctctccctggcctgcggtgaaatgaggactgtaagggcattgcagcgagtttcccataacatccatttcacttcagtaacccattttgatgcctcttttttattctgagatgatggtctttggattctttggggttagaacattccttttatgcaatacataaatgtctagtatgcaccatactaaatggtgttcttttttttaaacatctatatttggcaagaaaagaagtcagtggttctgtgtggcccaccctcatattatgctacttcatagttttcatttatagacattgaactagttcctggaattctcacaggatggtaggctgacacccacgaaggagaagtccaggggtcgtccttacagcgagaggagtgggagctggtggtgggataaggtggtgggataaggcccttggaaaggcgtgaagaagcgggaggatgagggtcattgagggctggggtgggggatgcccggcaggctgtggacatggctgatgggcctgccttggatgctgatgctgcaggggttttggcacaagactgggcaaggggcttttcagggagcagcttcaggagaaggcgagaaaggtgctggagcctgcaggggatcgattatttgggggagaggaggtgtggggtgcagaataggacaggattggagaagtttggtgaaaatgggggtgcaagagaagcttggatttcccattaactgtcaatacagtcatggttccacctggtatctagaaacctgttcacaattgtaggtttagcagcacacagggtggggtaagtgtctctccccatcaggagcagcctctgaactctcctgggaccctgagcttcagggaacccaggctgtggcccccctcccccactttggcaatgctgtctgcagagggaagggccggttttactagcacagggagtgctccggctcctgtgtgtcggggaaattctggaagaggctctcttccagaagttatggaaggtccccgggagacagaccaccagtttgggccaaacccctccatctacatgaaacaacaacaacaacaataataatgtttacggccaggcaccatggtttatgcctgtaatcccaacactttgggaggccaaggcgggaggatcacttgaggccagaagcttgagaccagcctgggcaaatagtgagaccccatctctacagaaaattttaaaattttttgttgtggtggcacaggcctgtggtgttaactgtttaaaaggttgagggtggaggattgcctgggccaaggacttccaggttgtgatgacctatgatcgcaccactgcactccgccctgggcaacagagtaagaccctgtctcgaaaaaaaaaaacaaaaaaacccaactcctaagattacaaaaagcagtaaatatctattacagaacagaagaaaataaaaatcacctttaatccagcacccaccaataagctctgggatcactggggggttatttccagcccttccccttcttttctttaagtttttgaaaattctaaaatattctaaagtagaacagaaaagcatagaaaataatattgcagacacccacctctcaggttgaacaaaccttaacattgccatacctgcctctcttctcttttctttctatctttcttagaaatagaaatgattcaggtccagaaggagtcaggacagtgtggtctactggccaaacccagcccctcatctgtttctgtatgacttgtgagccaagaatagtttttacatttttaaagggttggaacaaaaagtcagaagaaggagaacatagggagttatatgaaattcaaatttcaatgcccataaataaagttttattggaacacagccatgttcattcatttgtgtattgtctatagctgctttcacgctacaatggcagagttgaatagctgagacagagaccatatggacttgtaagcctgaaatatttgctatctggccttttatggaaagtttgctgacgcccaagatacagctaaagccacctactctctctccaggcataactggccacctaaaggtggtgggtatcctgcctacatgtgctttctgcttttacatagaagcctatgcttccaagtgtgtcgaattgcattgtgtgtttaaaaatggatatggtgaaattgcacatggcagagaggagcaaacacatatggacaccctgagacctccttagtttcctgaactccagcagcacagagtaaatgccagctctctgccagccctggaatgggccctgcagatgcagagaaaagaatcgtgggaagaaaactccagaagaaaaaatggggaaagtgacactgccgactcaaattactagaaatcctcagaaagtaaaaaaggaaaaagaaactcagggttgagagaagactttgggccggtgaattcatccttggagtgttcaggaaatccagagatttttggaaggctgggaattctttggaagtgaggcgtgtctggagataaggaataggaagcatgggctgtcaaaagcaattgttagggagctcaagtagagaagcaaaaggaaaacctggggacaaggtcgacagatgctgaaaaccttgtaggatttatactaggctacaccagactattaacgcggccaaccagagaccaacaagggagcaaacccttgcactgtccttgcggaagggccctacccagcatcctgggatgtaactgggaaggatgtgtctcattagcacctctgccccacctctggaataccagctccaagccaaacacgtcccctctgagcagctgctgtgccctgcccccgagtgctctatgttgaggatcctccgggcaggaatggtgggctggatgctgagccctctacagttgtccccatgtccctctcccaccagactccactccccagcagcagtgggcaacctcctctgattctgaaccacctcctgagcttacagaccattggaactcgatcccagttccctttaggagacagcaggctatcatagttccatggcctcaggacactgtacctgtaccacctccaaactcaacatcataaaaccaaaacgtgaaatcaacatccctcatctctttctgccaggtagctgggactgagctgggccctggggacatagagagaggccaagggccaggcgcgaactcagcttcctgagtcacttgggagcactgtcttctcactcatctctgcacagtgccattcctttcccacattggggcaacccttagattcagagatatccgggcttgaatcctgttttcaacgtttcctagctgtgtggtcatggtttgaacttcagtttcctccgattaaaggtggagctgatgtttcttaattcaggagtcgattttaggataaaaatacaaatacgtggcacagtcattatctctcttagatctgtttctccacatttcctggtgatccatttttattacatagagacaactagttgttttttagaactatttgttgaaaaacatatcttttccagcatcaatttacctcggcactgtttttgaaaatcaattgcccatgtatgtatgggtctatttctagactctattctgttccattgatctgtatgtctatccttatgctaatactacactgttttgtaaattagctatgtttcaagatcaaagtacttcttgagaccaggtaatgtaagtcccccaacctgtttcttctttctcaactttgtttggctgtctaggtcctttggtttgccatctaaatttaaaattcatcttgtcagtgtcctcaaaatttttattttggattttgattgggattacgttgactctatggatcagtttggggagaaatgtcaactaagcaatactgagttttccaagccttgaatgtagtatatctctttatttagatccttaatgtctctcagcagagtttctgagttattagtctcttatgtgttaaatttattaagtatattttggtgctcttggctaatcactgaagtggctgagattttactttacttgcagctaacaagttaaacaagtagtttcatgagtgctggcggaagacacgagacccctgggtcagagacaaaggactctatgatccatggcgtagcagatggaataagcttcaggtttatatcagttccccttcccgctaacttcctagtgctattgtagaacataaaatcatctatgctagaacataaaatcatgatctattctagaacataaaatgatcttctttgtagctttcccaaattataacctcatgtcccctacaggatcttatatacagtctgagtcaactgttctagaggctaaaaattacacaaaggactgaaattcagttttgctttagtatcaaatcattaaattagaactttggagataagttaaaatttgacttccaagttgtcaaatacagaaaggtaaagaaagtttcaaaatgatatggaaaagccagtatgtacacacttaaaaccttatgcctgtttatatttgttagaaaaaataagcctgttatttcatatagccatgttgttctaatttaataatatagatttcaaataaacatgggttggacatggtggctcatgcttgtaatcccagcactttggaaggccaaggctggaaggaggattgctggaggccaggagtcggagaccaccctggccaacatagtgagaccccgtctctaatgaaaataaataaagaaaagaacaaaagtgcagaacattactaaggtggaaatttggggggaaaatagtttacagttaatgaatgaaatgaaaaataagatgaattaaataatacatgtggatatttaggttttgataatcatggttccctctggagtgctataattagaatttatataccctaaagaagtattactgatgtacttagtacctatactaaaggtaaaatacacagagtgtggagtgactgtatgaaaggataacatgtgtacagatgtgaaaacatctccaagctatattatgaaagaagcaaccaaggtatcctatatttttgtggttttcaagctctatcgcatatgtcttttgataaaaggtgcattatggagaaagagcaaagcttaccttatatgggaataagtgtggtatttctaaaaggaagctcttctcttttattaagccatttgtagatttgaaagaggagagatgggagcccttgaaattccatagtcctgaatcagacgatgatctgaacctgtatctctctatctttactttaatgtaactagaatatgttgagcctggatccatggatgtattagtgcctgtggctgctgtaacaaattaccacaaacttgtaactcaaagcaacagaaagttattgtcttacagttctgggggacagaagtctgaaatcattttcgctgggctaaaatcaaggtgtcagcagggctgtattccttcttgaggctctggagaagaatccatttccttgcttttgccagcttctggaagttgcctggttccttgtctcatagccccatgtcactcccacctctgcttccatcatcgcattgctttctctgacctgcctatctccttcttgtaaagacccttgtgattattttaggcccacccaggtaatccaagataatctcctcatctcgacatccttaaattaatcacatctgcaaagtcccttttgccatagaaggtgacatatcacaggttctagggattaggacgcatggttccttggggaacattattgtgcgtagcacaggtgggtaaggtttagtaacctccaagcaacacctctcctccctgtcccagagaggcgtgcctaaaggctgagctagaaaaagtgtgcagtggtatgttctcaatcataagtgagagttgaacaatgagaacatgtggacacagggaggggaagatcacagggaggggaagatcacacgccggggcctgtcggcgggttggggggccaggggagggagagcatgaggacaaatacctaatgcatgtggggcttaaaacctagacgacaggttgatgggtgcagcaaaccaccatgtcacatgtatacctatgtaacaaacctgcacgttctgcacatgtatcccagaactaaaagtaaaattaaaaagaaaaagtgtgcagtgggagccaggagagctgccaatttatcaatgcattattttagcaaactctttatttggcttcatcccctatccccagccccaacacacacacacacacacacacacacacacacacacacacacacacacaacactcttaaatagacgtacacagaggcataagctggacagctcttcgtctggaaagttctaacaatctgaagattccatgacttgttgcatggtgtgttttgtttgttttcgagacagagtcttgctctgtcacccaggctggagtgcagtggtgccatcttggctcactgcaacctctgcctcccgggttcaagcaattttcctgcctcagcctcctgagtagctgggattacaggtgtgcaccaccacgcctgactaactttttgtctttttagtagagaccaggttttgccatgttggccaggctggtctcgaacccctgacctcaaatgatccacccaccttggcctcccaaagtgctggggaaaagcactttggggtaaattacaggcgtgagccaccacgcctggcctgcatggtgttttttacctttggcttcctgctcagttcacctggcccctccctcggggagcactagccagttcactttccacgtgggagctatgtttccccacccacaggtatgttcctgattcctgatctttggacttctctgatccactttttctttctttctttttcttttttttagacagagtttcactcttgttgcccaggctggagagcagtggcgggatctcagctcactgcaacctctgcctgccaggttcaaatgattctcctgcctcagcctcctgagtagttgggattacagttgtgcgtcaccacacccagctaatttttcatctttttttttttaatacagatggagttttgccatgttggccaggctggtcttgaactcctgacctcaagtgatctgcccacctcggcctcccaaagtgttgggattacaggcgtgagccaccacgcccagccagatccactttttctaactggccatttgtattagtctgttttcacgctgctgataaagacatacccaagactgggaagaaaaagaggtgtaattggatttacggttccatgtggctggggaggactcagaatcatggcgggaggtgaaaggcacttcttacatggtggtggaaagagaaaatgagagagatgcaaaaccagaaacccctgataaacccatcagacctcatgagacttattcactaccaccagaacgctatggggaaaccgcccccatgatctaaattatctcccaccgggttcctcccacaacatgtgcgaattatgggagtacaattcaagatgacatttgagtgggaacacagagccaaaccatatcaccatttgagctgttgttgatttttttttttttttgagatggagtcttgctttgtcgctaggctgtagtgcagtggcacgatctccactcactgcaacctctgcctcccgggttcaagtggcacgatctccactcactgcaacctctgcctcccgggttcaagtgattctcctgcctcagcctcccaagtggctaggatgacacgcatgcattaccacacctggctaaatttttaacttttcttagagatggtggtctcgctgtgttacccaggctggtcttgaactcctggcctcaagcagccttcctgcctcggcctcccaaagtgctgggattacaggtgtgagccactgcacccaggctgttgtggattttaatttgttttgttttgttttctgattttgtattttctcttccttctattcttttctcttcagatgtattcatcgagtacaatttgtgctgagtcatatcacctatttatattttaattttactattagttttgggaagtcttaattatttttcattcaggaaattgtacagtcatctgtttccattcatagcccgtccccttctccaaagagaacgtctgataacaagtttttggctactgtgtaatatgatatttttctatgtaagtgcatgcacatgtaaacaaagtaaaacatcatattaatcacatagacagcaagtgtatttcagcttaaagggtccatagtaagccttactttttttttttttttttttttttttggagacagagccttgctttgtcacccaggctggagttcagtggtgggatcttggctcactgcaacctccacctcccaggttcaagcaattctcgtgcgtcagcctcccaagtagctaggtttacaggcatccaccaccatgcccagctaatttttgtatttttagtagagacagggttttgccatgctggccaggctgagtgttggccaggctgatctcgaactcctggcctcaagcaatccgcccaccttggcctcccaaagtgctgggattacaggcgtgagctaccgcgcccagccagccttactttttattttgaaataattatagattgacaagcaattgcaaaaccagtacagagaagtcccaagaacccagttttctctgatggttgcatcttacataactataggacggatcctccagctgcagttgccctctagccaaagacccaccaagagtacacctctagttgaataagttgcatttattactcattgcagtgagggagagcacgcaccatggggcatctcagaaagtgtgtgttaggaagaacctagtataggatttgggttttggttgggtgacttgggggaggtcgaagggagtgggattcacactagatgaattgcatctgctgtcagaaggcagaggcaagtctataactgtgtagcttgagtcctatctctagggagaggaggctggcattgggggctaaagctgtgactggtaaagtagcagcagtcactgctttcagccaagagagggtgatgattggtattttgtgggtggcacagtgaccttgtctttatgggttacttcaacaaaaattaggtagtgaccttgttttgtctcacttcatcatggcctcagagtaaccttgtctgaggttgtgtcttttgcgattatgtctaaaaggagaataacgtggtatagccgtgaatgccaagccagcttcccgatgtcaggggcttttattccagatctttcgtgtacattggtaccatgcctgcgtatagttctctgccatttcatcatgtatgtagatttgagtaaccaccactgcaatcagcatccaggactattccatcaccacgaagatgtcgcttgtgctccccctttaacatcacatccacctgcctgccccaccaccatccctaacccctggcaaccactaatccgttttccatctctattgctttatccctttgagaatgccacgtacatggaatcatacactatgtgaccttttgatactggctttcctcgctcagcataatgcccaggagatccatccaagttgtcgtgtgtatcaatagtgtgtttcttttttagggctaagtagtattccatactgtgtgtatttgttttctatgactgctgtaacaagttaaaacttagcggcttaaacaacacaggtttttaatcttacaaccctgcaagccctctggcatgggtcttgccagaccaaaatcaaggtgtcagcaggctgcgttcttttctaaaggctctagggaaaaacccatttcattgctaattccttgctaggggaattcaattccaagtggttgtaagactaaggtttctgttttcttgctggctatcagctgagggctgttcccagtttctagatcaaggccatccacattccttggctcgtgaccacctctgtctgtgtcaaagctggcaacagcagatggagttcctctcaggcttagaatttctcctgcctctttcctcatcacatttctctgactcaccttcttgcttccctcttccacatttaagaatgcatatcatttggccgggcacagtgggtcacggctgtgatccaagcactttgggaggccgaggctggcggatcacttgaagtcaggagttcaggaccagcctagccaaaatggtgaagccccatctctactaaaaatacaaaaattaggccgggcgtggtggctgaggcctgtaatccaagcactttgggaggccgaggcaggaggatcgcgaggtcaagagatcgagaccatcctggccaacatggtgaaaccccgtctctactaaaaatacaaaaattagctgagcatggtggcacacacctgtagtcccagctactcgggatgctgaggcaggagaaccgcttgaacctgggaggtggtgattgcagtgagccgagatcgtgccactgcactgcagcctggcaacagagtgagactccgtctaaaaaaaacaaaaaacaaaacaaaacaaagaacaaaaattagccgggcatggtggtgcatgcctgtaatcccagctactcagaaggctgaggcaagagaattgcttgaacccaggaggcgaaggttgcagtgagctgagattgcaccactgcattccagcctgggcgactgacctagactccatctcaaaacaacaacaacaacaaattcttatcattagattattctcacctcgataattcaggatgatttcccatctcaaaatccttaacctcaaccacatctgccaagttccttttgccatgtaaggcaacatattcacaggttctgggaattaagagtgtggacttctttgggggaccatcattctgccttactcattctggatgtaacacagtttgtttaaccattcatctatagaaggatgtttggttgtttccagttttggggctattaaaaataaaggtgctgtgaacattcttgtaaaaaaaaatggtatataagtggattacacaccatttccttttgcaactgatttttttcactcgacatcatatttctgagttgtattcatgttgatctctatagctctaggtcctttgtagtgccattgtgttccatgtgaatagtgtcctcccttccttgctgtgtaatgttctattgaatgactgttcccctattggtggacatttaggttgcttctaactttttgctgctacaaagagtgctgcggtcagtatctttgtgcagatctccacgtgtgcaggatgaagcagttttcttgactggatgagtaggagggaaggttctggccctagcacatatgtgttgtcggttcctactggctattgtgtaattgttcttcaagcccttttcactccatcagcagtgatgaaagtgttctgtgcatctctgccaacatttggagtcgcagttctttttaatttctagactggtttctttttcatttcttttacttagtttcttttaaattctggactggtctaggacctttccaaaaggtatgaaatggcatctgagacttttaatttgcattttcccgatcactgccgaggacacagggacaccccagtccagcacctccttgttctacactcttgctgacttcttttctcctgacgttagcgttaagaggttgctgcctctacctgcctttaagtattaagatctgggcgatgcaacccgacaactgaaatttggtgtcttgtctgaaattacaggatgttcctcaggccgccgtgtttccatgggaacaagtaacagtcatccttcatgattaggtggtaaccatggcaaccaagccagcagcatttgaatgaaactgattttattttatttattttttgcaaacacatgaaggttaaaatgcatttctccagctgtggcttccaagaataggaagacagcctggtaaatggagaccctttccacctcctagaggaaaggggatccaggatcagctggtcccatggcctaattttgcagactaggtgaccgagaggtcacatagaagtcatgcaatgagtttgagccgaggaggaaagactgctggatcatgctcgaaggtctggggcgcactcttaagagatcggctgggtctcccttcccgtgatctaaccctaggaatgccactttcatactgtgtgatcttagcagattcacttcacctctctgggtttctactggcaccagctgtggtgctagacctatgggaccatgaggccaggcctcccagtgtctgtttgcccaaattagaaaagatttgctgcaaaatgaaaggccaaaggcagcatgctggggcctaggaccccgaggctgaatccccagggtccagagttagaactcagggtcagttccctgccttcttttcctgtgtaaaataatagagggtgtgtgtgtgtttttacttggttccaaggactggagatgaccactgctcttactccctgactcattggattgatgaaatcagctcagagagagaaaggggcagccatggagtcacacagcagagtcagggttgaatccaggctcctggtgtcagcttggctcctcacccaaccccatgctccatgtcccctccatcttctctggggctggaagtgtgggtttgggggcagtttaagggactttcggcatatactcttgcttcttccctggaggacttttagaggtagtcacttttgcttctcagaacttcagtttctccatctggaaaatggaactcactatagagctgcccaggttgtcctgtgggattacatttgaaagggtccagaacatgcattctcagcaggggcgagattgcccctaagtgggcaaaaagttggttcttgggctagaagatgaaaaaaaacctttctgtacaaagcccagtatacacacagtacataaaagatactgtatgtctgtgatattaaaattttatggaggggaaattaggaaaaaagtgtctaagaagacttttaagggagagcgacaatgaaaaaacattgagaaacgtgggtccagaacccagcgatccatgtcttcattaactttgtgtttagagcttacggcaggtggctggctccgtggggaaggtgtgtggggtgtcaggtcaggagagagcctggcctggcccagactctgccctcgatgttcagtgtgaccacgggcacatcacagctcctctcagggcctggtttccccatctgtgggtaaaggaggtcccatcagctccatgggtgactcccaggcagttgagctcccacctggtggatcagttcagggtctggagaaaagcaggtggtgcctcagactatggtgattagaggagcgtttaatagaggggctgcttatgaaggcgtgggcaggcctcgggaaccacggggcagtgcaggaccccaaagctagggacagcgggggctgcttccctgaggccccatggaggaggggagagcgtggttgctgggaggcaaaggtccagaagatagggtcatcccgatggtggctgggaccttccgtggaggaggcaggcagcccagatgactctccctcctcccctcatctcttgccagggttcctctttggccaaaccacatggaagttgagggtctagaagctcagatcataaagtctatacaggccagtgccctggagcagaaggcagtgcacagagacgtggagaatggaactaggggccacacaggagatacctgggaaggtgccccaggtttccctccagtttcgtatggagtgcaggccttgccctgggtgtgggctgggagactggagaggtcagggaggagagccagccgccctgtgcaggagggagagtgggcccctatcctccggccacctgggatccttgcggccttcctagcttctcaggtggaggggtgtagccagggcttctgaatggaagttaaagacttctgggagcactctttgctatagacctgttgttgagggatcacacacacatttctttgcttctggtctcagcttcatcatctgtcgaatgggagattggaccaagcaacctctgagagcttcctggcccagacccaggaggcaagaggcaggattctgggcatcagtgttggtctcagtggaaagacatcctcaccgggcacccagtgttctaccagggcactccatgcacctcttgcctggagtggtgagggcccacctacccaggaaagtgtaaagctgtggccagggtggtgtgtgtgtgtgtgtgtggtgtgtgtgtgtgtatgtgtcaggagagggagggtagttcctggaagctccagctgcttttgtcctggtgatcccaagacccctgtggggcagcctgactctgccaaccaggttccataactgcagtgggtaccccgtgtttgttggtttgatggaggcatcttgactaagcactgcagggtgcctggctctgggtgggggtgggaaacagacaacccatcttcctgctgagtcgccaagtagcaagtctgcagggctgactgatgtgcggggttgtgagtcatccttcctaaagtgatctgggcgcccccagcattgccccagagctcaaaggatgacagttcccgcaggaggccattccagggaagagaattctagggagggggagagcataggtaaaggtgtggaggtgggacattcctgcatcgtggcaggtacagcaaagagggttagcaagaacagaagccagagagtgtgtgaggtagaatggctttcggtgccaaggtgaggagtcccttctttctgagggcattgagggcattagaagcagtcgggcttagggtcctgactgtgcctggcactgcccatctcccacttctaccgctttccctagaaaggtggctgaacccgggggtctgcctctggctaaggtttgcatcctgagactaagccctgagtacctcctatgcgttggccccttggctgggtgttgggacccatgggacttaaggctgaaggagccatggactcggtccagacacactggaccctcattcctgttgtggtgctcagtagccctgtgaccttgggctggtgactgcaccctgagcctcagcttctgctctggtcattggtagcttggctgagtatagcagatgggacacaggttatgggtgacagcctcccagagggaggtggcatgtgctgtcacagaggacaggagggtgctccaggtgggtggtgcgaaggggtgagagatgaaggcagacaggaaagcatgggaagaattttcctagcaaaacctccagaaagagtggttatcccctgactgtgactagagagattgtggaggaggaggtccaaggaaagttctaagcaggaagcaccgtgcgggaacagcaagggccttaagagacggcgccaggctgaggatgagccatgtgggaagggagcttttctggaagaggcgcctggggctggatggtctggacctggtgtcaatgcctgccccaggcctgcctggaggtcagcgggcctgaaccagtctcaggacagctttgcctgcttggccatgagccaaggctcaggatgaagcctgtgcttctgtggactcctgtccatgtgactgtgtggagggaatggcctggaaagcacacagtgccccagcatcctgttctgccttctggaaagcctgctccttgtgtgaaccccatgtcatctgtcctgtgtgtgtgtgcgcacgtcccctgctcagtaggtacctggggtgggtctgggagtgtacacattggagtatctgcatgaatataaacatgcacatgtgtttgtctgggcattaccgtctcactccacacccctgtgtgttcacacctaccagggaaacctctgccctgtccttcttctcccttgcgagtcaacaggtctttcccaggcaccccccacgcaccaggctccatgcagggtgctggggaggtggagatgcaaccagcttaggcgtaggtgttaggagttctgcagacgcacacacacacacacactcacacacacacgcacacacactgcaaatgagagcgttgataggagactcaggtctagttattgctgtaggagccaaaagcgaggcaagagctggaagtagagggggtcacccaggacctcctccagggcctgcaggatggaccaggctggggaaggggagcaggaagggagtcctctgttgggggccacctctggagcaatggcaaagaggcagctggtgccacgctgttgtgggggaaccagtgaggaaagtggccaggttggcaggttggacagactcaggaggttttatgtaggtgtgctaaggccatgactaaaagttttcaatgagctgtcaccatttaagagtcagaatacttcatattttgaaaaacccagattatcagcctctcttgaaccatggcagctatggctgccctgagcccctccttgtgatgtagcagtaaccaattagcgccgagtggctggctgctttcctagattctggatttcctgctggcctctgtaggcctcccaagtttaaagcctctggaaaataactggaagccagaagtcacagattctcatgtttgaaaaaacgtgggggctgacatagtggctgagccctgtaatcccagcactttgggaggccaaggtgggaggatcgcttgaggccaggagtttgagaccagcttgggcaacaaaggaaacccccatctctacaattttttttaaaaaaattagataggtgtgttggggtgtgcctgtggtcccagctacttgggaggctgaggcaggaggattgctcgagcctaggagttctaggctggttgagtatgattgcatcactgcactccagcctgagcgaaagagtgagaccctgactctaaaacaaacagaaaacttgagaagtcatccaagctccccaagtgtggcatcccaggagatggctcagttatctgtctgcttatatgcctccagtgacagggagcccactacattacaaggagtgggggttttggggaacctttccccccgcttttttttgagacagagtctcactctgctgcccaggctggagtgcagtggcacgatcttgggtcactgcaactttcgcctcccgggttcaagtgattctcccacctcagcctcccgagtagctaggactacaggcacacaacaccacacctggctaatttttgtattgtcagtagagacagggtttcaccatgttgaccaggctggtttcgaactcctgacctcaggtgatcctcccgcctcggccttccaaagtgctgggatcacaggtgtgagccactgtgccaggcctttttcccccctttttaaaaaattgcgataaaatatgtaaaacataaaagttatcattttaactagttttaagtgtacaattcagtggcatgaagtccatttgtaatgttctgcaaccatcaccactatccattcctaaaactcttcatcaccctttacagaaactctgtaccattaagcaataactccttgttcccctctctcatcagcctctgctaacttcaaatctgctttctgtctctacgaattggcctcttctagatagttcatataaatgggatcatacaaaatatgtccttttgggttactcagcgtaatgttttcaaggtccatccacattacagcttaaatcagaacttcattcctttttagagcagaatggtattcctttgcatgtcagtaccatgtgtgtgtgtccattcttctgctgatggacccttgggtttccaccatttggctgttgtgaacatttgcatacaggtatttgagtacttgttttcaattattttgggttatacccaggagtggaattgctgggtcatgtggtacttgtatttttaatttttggaggaactgccagacttttccatagtgcctggaccattttctagggaccggtttgtctgttgtcctgactgggatgggagtggcaggaggccctagctgtgtggccttggctgttcttgttcaacctctctctcctcctctgttggcagagtcgcctcaagaaaggccgggctctcggcgcagcctgcctggcagcctttccgagaagagccccagcatggagccctcggccgccacgccgttccgggtcacgg

SEQ ID NO: 15540 - DNA, 48380 bp, Homo sapiens
tcctccctctttcttgacccagacctctgtgctctggcctgcaccctgcccagaggccccagagggcgacttgccatggctggaagcgatagtttgctttcaggagtgtttctcgtcttcttggacctggaggttgtgccatgtggttacctgcatggaagacggtaattttccacttgtttcctgaaggacacggaaacctttagatgttgtcatcactgtgtttatttaagtcatttttgaaatttcagcttggaagacacagattcagcacgtgcctttcgggaaggggaagccctcctaggctcacctcttagatgccggcccggccgagaggccccctaatctgtccagaagagctgcctgggtgagcaccacccttgggaatgggcctctgtggccttggacttcttagtgacaacttcggcaagatcctgggccgggccggaggggctgctcactggagacctggccatcttcggaagccagatctggctccagagcctcgggggttgcaagtgcccagaaccaggtcagcagagaggcctgcgctcccaccacaaaggtctgtttgaagtcctgtgggagggaggacagacaccacaaggaaacttcctccccggtgggtgggtctccagccaggtatggggtcagacaggctttggtcgggctggagggtgaggagctgtttctccaatgaggcctggtcccaggactgagtcctcagtgggcagggcttgttggtgtgctgtgaaagtgcaaggcttgggggactgaatgggggactcccttggacatgggaggaagagtgaaggtgggggctggggttgctaaactggttcctcctccagggaagcaagccctgccctcctggagcttccaacctggaggtggggaggtgggctggggggaagctttagggcacagctcagagaaggccaagcaggcaaggttgtggggcacctggaaggtgggtgtccagcggcctggctgctgacctaggctcagggaaccagcatttggtgggtgagctgtgaggaacgggccttgaccctaggctgcagggctaatgagggcctttagccagaggctcccagcacaggtgagggggaaactgccggtgcccctgtgccctcgcgctctcccagccctgcctctctgagacagatttaataatccatgtctgtctctctctctctcagttagtattgcaggagggaagctttacttctaaaacttttattgatccagacactaataaaagtaaagggtttttttttcttctttcctgctagagcaaagaacatcagacatcagagccctaaaacacaaatgtgttttcctcctccctagatctgggagggagttgtgggttggccttgttcagatctagcctcttcaagaagcctccctaacttctcaggcctgcagtcatccacctgttccagagcagttaaacgaaactgccacatgtgcctctgtctgaccccagaaggctgggctgtcacagaagctttccttcccacctgaggtccccagggttagggagagacgccatgggaggcattcaagacctggctcttgatttcttgtgtctctcagggtttggggtttggttctttggctgctctggtctttgtttttgcatcttgatttcatcaggacttactgagctcttatactgtgtcagaccctctcttaagacacagaaatacaacacgtagagcttggccacacacagcttaccttgtgatgggagaggcagataagaaataagcagagaaacaaagtgattctgctttgggaaacatagtgaagttcccctactgaaatgtgagtcagggaatttctgtctgctttgttcagcacctgtgttcccagtgcctaaatagtgcttggcacatagtttgcacttaaatatttgctagctgcatgagcaagatgctatgaaggaaacaagccaagtgttccactagggagtaatgggggcagggcaggacctgttgtagatggagcagtcagggaaggattgagttgcagaagatgccagaagcctgccagtttgctgttagagtgtgctggagcaagaactcctagcctagggagcagcaagtacaaagtccttgagcaggaaacagagactttggtgtgtgtggtggggggcgttgggtgttgctggatgaggtcagagagtaggtaggtcatgactgccaatgtctttcacctgggtagcagttcagatttattcagtgcagtggggagtaattgaaggcttttaaggtgaggagttcagtaatctgatttgcatttctgaagggtccctctgactcccctggtaggggtaaggggaagcccagtggttggggaggctgcccggacagcaggctgcctggggaagatggagaggagtaaacaggtatgagggatttcagagggggtagcagcaggatttgtgttggattggattccaaaggccagggaaaggaagggctcctggctttgctactgaggctccacgctggacatttcagacgtgaagctccgagaggtgtcccagaggcgctgtcaggcaagcatggagacacatgggtccggagctcagaggaggatagggctggggatgcacttaggagtcgtgagcatgctggaggtatttagagctatgggagtggaaagaatcaccaaaggaaagtgttgtgctaaggaagtgtctccgaaacagccctgaggagctccagcactgggaggaaaggaggtgaggtgctagcagcctgtgagaacagaggaaagctggagcagggtggcctgggttcacggggtagtaaggcacagaaactggttgactttggcaacatgaaggcctttggtgtcctcaaggagacccagtggggtcggaacagacaggtgtgttgagtaggaaaaggaggtgagaaggtggcggggacagcagtgagcaaagaagtgcgtgaggacccagctggcccaggatgttgaggaggggagggccagggaggggcctgaatgttctctgtccacagcgtaggtttaccagcagcagctgacccagtggatctcagcctggagattctgattcaggagcgccgataggccccccacagtgatctttcccagctctctgagccctctccacccactctctggaaggcttgctcactgtgccctgtcacgtttttggactgaatgctgagtctgttgaccctgtgttccccccgtcagcccctttccttacaccagtctctctgggtccacggcccctaaataagagtatcctggagcctggcttacctcaagtgtctttcccagagcagagctagacttcctttacaccaagggtatttctctggaaggctcctttatgtgtttggcttctggagaagtttgagatgttttacacaatattttggtggccaggagctctaaccctcacccccaacaaccctgccccaagactttttgctggctctggggagggttcagaatgcatcggcttgagggtgcagggttggcatacacagctggagataacataatgtctgctagacgcctggtgggtttcagtgtctgttgaatgaatggcactcagatatttgagtttggggttcccagttgctttgttaaatgcttttcctggttaaccagtgtttttacatctgttatctgcaggggatagtgtattacctcattttatacatgaggaaactgagactcaggaaagtaaaaggatttgtccagggttccacagttgctaaatgacacgaccagaattggagcctgggcctgcaaaacccccaaattgggcctcttcttactgactaatcctgggggtgaggtagtaagggtggaggttaaggcacccaggtctcctactacctctcaagaatagtggccagatgttctgccagggctccaaggcattccttctgcctcccacccacctgtttcctctgatgctcgacaccccctcctctccccacatgcgcaccagatgcattcggctccaggaagataggatgaggcaagccttgaaccttgtcaaaccttggggatgcttgcggcaaagcctgtagcttttggggaggctgtttctgcaacaggcgtgtagggtggccctatggctgatgcagaactccccataggtaaggtgagctcagccggatcacatgccatgaccacacgtgagcatggaagacaaacccagagaggtctggaggcagggcccctcccggagaggcaaagccacttatgctgcctcctgacagcctgtgtggctttaggctctcgcttccctcctgctctgcccctcctactcacccagcagacttgcttagtctgggcttgggtagccgagacaggttgttttcaggcctcaaaggatttgggccacagcccagcctttctcagtgtttctcaccttctgtccttgtctccttatgggacggagcaggcatctggaaggtggcagaggggtgatcctgcctggaaatcactgagggtccttttatagaaagaaacaggctgagagaaagaaatgacttggccacagtcactacccaagaggctagtttcctgtttgtgcctccagctatcctggggcagcttccttcaccccagctgaaagcaggcttttgttacgcgctcactctcagcaaggctttgttctgtatcctctcggcaatcctatgaggtaaataatattatgtccatttttgaggaggaaacagagaggcctagggaggtgacttaacctgtccaagaccacacaggttacaagtggcagagtccgggtttgaacatagcctggcttcagagctcattttctttaccatcaggctacacattctgaaacttatttggcttccaggcatcacagaaacagagtgagggtgctaaatccttgaatgactcagcccctgtggagttggacctgaagacgcctcctggccttggcttttctgaccaaagatagccacactgggcagggcacggtggctcatgcctataatcccagcactttgggaggccaaggtgggtggatcacctgaggtcaggaatttgaaaccagcctgaccaacatggtgaaaccccgtctctactaaaaaaatacaaaattagccaggtgtggtggcccatgcctgtaatcctagctactcgggaggctgaggcaagacaatcacttgaacccgggaggcagaggttgtagtgagctgagattgcgccgttgcactccagcctgggcaacaagtgtgaaactccatctcaaaaaaagaagatagccacacagcacctactgtgggcccagccactccaggtgccagaatggcccacgcttctctgagggtgccgtagaccaggtgctgagacgcagacagtccagtctctcttcccttcctctccccatcccactcctattccagtaactaggcaggccctgcccacccttgccccaggagaagctccactcttgtggacagtggaagggcctcggccagcttgcctgagtcctgggcttggaaggacggttgcccccatctgccttggttccctgcacctgccttttcttccccgcatcctccctctgactgcccgcttttctctgctttcaccttcccctagtgttcctcttctttcgtgttgtgtcagaagccatgatttccagtcttctcatctggaagatgaaggaaaagatagacccgaccccacagggttctgaggctcaaactgaaagcctggtggtggggcacctgtgacaggtgagactcctcatcttgcccccttctttcttcatcatgaagaagagacactggaggatgtggagcagttggggcctgtggtccaggtgggatggagcagtcagggcctcgtggagggagcaggtgggaggaatactctggctgggatggacctcacggggtgtggcccagctttgcagctgacttgcatgaagtcctggcgagctggggagcccttgcaccctcagcttcctcatctgaaagatggggcaatggtaatgcctgtctgtggagtggtgaggaacaaatgagactgggccacaaagtacccagtgctgtgcccagcacatagtgcccaaagagggctgctatctcatctcttattcctgagatttagcttccttgttttgtttttgagctctttgggaccttcgtggactttgaatttttactattgttcattgtgtctaaaatcttcctcagaagccgagggcctctaacctgatcatgaattttggagtttcgttttttgttttttttttctttcctgtttcctgtataggaaaaagggacctgtacctttaagaccccagcaggcccaagtaggacactggccctttaaaagcacattacagagagttggaacatagcctttgttgaactagccatgattagtcccagcggacagggctggagtggcatgtctgggatcagggcggggctaggctggccggggccagccaggagcagcggacagcaggaaggctcgcccggccactcggcttcccgagcctggtggctatgctgagggatggtgagtggcctgagcggagcttagaataagagaggctgggaaagccaggagggaggcagccccagagcccagggagacctgaatgagctgggcggcagcagacaccctcagtgagtgactgtcacaggagctggtcccaggagggactccggagcaccctgcccctctacgcagacatccactgccggcccagaatgtagaaacggttaggagggacctgtgaaaaagcgggacaccaagaagagcactgttgctgtttttagtttttaaaataagaggaagcccagtgtgagttgctctgtcccccaggcgcggtgtcccctgtggtgtgctccgttgagaactgggaaatgccagggactgctgacaagttttctgagctgaggagcttggcctttgctctgagtggccgaacctttggctggctgggtggggctgcactggggtttgggggccatggtatctctgccccagctcctcagcagaactttgttttttcttctcccttcctgcttccactccctagtccatggggcccaggcccactgggtggggtggaggcgggtgggagactgggaagactgtgtctgggccaggagcgtgttttggctctgcttgaatatttgaaacagttgtcagaagccagatcactttggtgtggtagcgtctttactgggcaagtacccatttctgaaaaaaagtcagaggaaggattgggcttgttacagccaagtctcagtgcaggttggtcctaaccgccttcattgccacggctgggggcggatgagactgcctgccagtaggtgtcctcactgttttacagacagccacccaggaggtgacaaaggcagggctcagtacatttctggtgacccaggcttcctgtagttacttaaaagttggtgcatttggtcataggatttttgtaggtttggtgaaaacctgaggcattgacgggcagtgaagagagtttgaagttagagccgaagtgccaggtgtcctgttccacccttgtgcctgtgaatcgtgacctcaggcaagctgtttgacctctctgagcctctgcttcagagcagagggcgtgtgcataggcgcaaaccctggagggagttgtcagttctgggggaggctttgtggaggtggtggcctttgagccaggcgtagacggataggctgctggagtgcaaccccttgagcagaggcgtgcagtttagcatgatgagccagatagggccaagcagggctggcatggctgggttgggacctggaaacgtagcttgggaagctggattttaagtatgttgctttctcagttggaatcctgtgggccaggtggcagatgacagggctagcttagcctggagtcagccagtgtggaatgtgggggaaaagggcagacggtgaagtctgacacactggccttgggaagcccctggaggtgtcagagcctcattctttgctgcagttagctgtgtgagggtcagaggtgcagagacagccctacgtgcccttcccaggtatgtgggctcactgtggtgtggtgggtgagcaggtacttgagagccacaggtggctttggtgcatggtcactggcagcaggaggaactcagcagccacactcctggttttctttgacatggtgtctgagtttctgcccgtgccagtggcctggaaccctgtggcttactgagagccactttcctgctgtcttgctgctgctgaacactcctggttgtctcctgctagttacagcctgagaagcagctgctctggtgccccacgcagacttccagacctcaggctttgggaggaatgggcagctgacatccctaggcccatagccccacatgctcctgcagacatagtggaggcgctcagtggctgtgctggtggctggatcaactctgcccaggattggggcggggcgggggtggggggtggggtgccttagcatgatacatcttcagcaaattgtgccaggaggcaagggcaacccacttgacggggtaggatgctgaggtgcaggagaggcccatccgaggtccacactcctttggcccagtgctccttcccttcacatcttcacctcttctgtctctctgagctcaagctgccaacaaggagggagcctctgtcccaaatggtggctggaattgaagagatagctgagctggagtgaccactggggctggagtctagggtgccagcatttgttcgtagatttgtccatctcttcttaaatgggggtctttcagattcctgcttaaaacggcctgtactctggagcctgctcttgaggtaagggggtagagcaggtgaggtggtctggggtcagttggcagaggggctttttgagagctcagctgtggggggagagtcaggaaggatctgctgggcagagtgagagacagatcttggaaatgtcctgggcccaggaagaagccaggagcatccagagaagtgctggcaggaagggcgtgcgggaagggacagaatgccccgggaaggcagtctcagcccagcctggatggtaatgggggcagccagggctggttactgaggctgtgtatggagagctcgctgcaggtcagttgagccctacagccaaaggtggtggtgtccctgttttccagatgagaaaactgaggcacacaggttaattaatttgaccaaagtcacagagttttgtgtgtgtgtttttaaggaaccatgcctgcttaccaccttcaaccagcatagtgccaggagctggggctctgcggacaaatggctggtccttggttgaggcaggaaacctggccctcaaggatgagggaaggaggccatccctagatcaccccaacatgaatggcccacctggtcccaggaagtaacgtggcatggcgcccaggtcttgggtggaggagatgagatggaagaagatgctgcctctgcccccgcattctagggggggcccagcatgagctaaggagggcttcctggatgtggagagctgggaggaattagataagccagaggggaagcacttcctggagaatggaaatactcgcttttcagctaatttattcttttgtttcattatcatttcccacttgggtctcgcatccccagggccctgaggtggctgttggaggtatttatggtcccgggtggggtgcagggaccagttagaaaccagtcccactcaggccatgatgcatgggtgtgttcacatgtgaggaggagccaggcacagactgagctcaaggagagggaacgcatgggtcagggccttgaaacattctcaggagtggtgctgagtggagagatgggggagggcagtgggctagcatgtttgtggtgggctctagagcttgggagcttcagagttgctgcagttgtggctggggttggagccccaggtgctgtgcagggaggttgggctcttttcctggggctgggggtagggggactgtcactctccctaaactttctgagcagccaggctaagcctgatagtttttcctacaggccagggagggctgcagggttgtccctgctcagaagcaagaggggcaggggcagctagcccacagctcacttctgatttgcccaccactcaccctcgtcaatgagtgttccttagatgctttttttttttttttttcccctgagacagagtctcgctctgtcgcccaggctggagtgcagtggcactatcttggctcactgcaagctccacctctcaggttcacaccattctcctgcctcagcctcccgagtagctgggactacaggcgcccgccatcacgcccagctaattttttgtatttttggtagagatggggtttcaccgtgttagccaggatggtctcgatctcctgacctcatgatccacctgcctcggcctcccaaagtgctgggattacaggcgtgagccaccgcgcccggcctagatgctcttcttttaaaattcagggcacttcgctgttctgctgaggtttatgaatgtttaaaaactgctttgcggtccccaaagtaatttgacaagtctgacagctattgattaaaaacccgaaattattcaggctgcaggatgacttgggggattagatggaaagttttttgtttcttctctctctctctgcacccctcctcccccgcaaaaaaaaaaaaaagaaagaaagaaataagatgtggaaaggtaaatgtgttcctgaatgttttttgaaaactccattaggcttgcacagtttatacggggagaggatgttgaaggctgcctctcattcaggagccagtaccagcgccctctcgaatccctggtctctccggagctttggcccaagtcaccccaggcagcagtgagatgttgctattacattattacaggtgatggtagtggtgttggtagcagttatgatagtttatggtcccttatgttctagggagttgacgtagggtttttgtggctttctctgaagtagctcagcgtgtgaggaaatggcacctagaagggggaggaaactcgttcagggtctgtgatagaccttagatacagctgggatagagaccaaagactccttcagggagaggaacgggccgttgctggggtgctgggctgattggatgcctggcctccaggcctgactcactgtgaggtaggtgccaagagtgtcccacagagggtgaccaggccgttagaaccccagctttcacttctggaccatgtgacctagccaagccactccctgtctctaagcctcagtttcctctttagagaacgtcctaaagcttccattgagccttttggattaactggctcatgtattgccccatgagccagggcttgtgggacctgagcttgaatacccactctccctttcttctggggcagtgctgccttttgtgcagagttgttgggagaaggccatgagatgatgtttgtactttggtgagaacacctgcaactggcacatggtaggtgcttagtaagtggctgttaggtccaggctgccacagtgtcattcatttagtcagcctatattgggcaccacgggacaccaggcctcacagcaagcatgagctgtcccatcctcctgttttggttgcagggtgtggaccctcctctgccagctcagccctgtgatgtggggggaagcacaggctcccaggggtgagggcagaaggccacgtgtctccctgtctcacagcccagggcgttctgtgtgtatgggggcgtcacaactgggtcttggtgactgctaggacctaccccttaccttggcctgagggaaccctgggttgagagggaccacgcctctgggccctgtcatccctggaagacttcccaggcagggcagccaacctttctgcctttttaggacaggctctgtctccccagggccctgggagccaccaggcggctgcattcctctcctctcccctgggatcccagctgggccaggagtgagcactggccttctgagcagccggttcccaggccagcggggcaaggctgggcttggggagagagctctgctggacatactaggcagggcgctgccctgtttatgtcctgccgtttgattcccagcaggtcagtgcattcattgtgaccatgtccagactctctttttttccagtgtgggcagacgcttctagcacagcctctggacctgcctggctatgacaggcagaagcatgattggcatgttctgacctgatgaggcctagagagtctgctgaagtcctgactgcagaaccatcaggtcctgccagcctttgggtgggcaccaactctgtggagacaaaccttgtccaggatttctcttccttccagacctggttggggtagtggacagtggcttgggaccacacaggctggtgggctggagactggggctggagatggctgtgcttgggagtcccaggcagaggggctaaaggggcctcctcacgggggtctactgcccactgctaggcacaccttcttctcctttcatttcgcctcaggaaatgaagggctttttaaagaaatttgaggcatcccagagcatttgggcagatatgattgatccccattttgcagatggggaaaactgaggcatggagaacgtaaagcgtttgagtcgtcacgggacaggaacaggaaacagcctgggaagtccatatcttgtcactccaaattgtcaaaagtgtgacctatcccagaaatgtcagccttgatagcagcgtgtgcatcgttcaccagtgttgttcatagctgtgtctccagctcctgacatcgtggctggcaatgaggtgggcgaatggaacagaccaaagaggcatgaacagttatgagcaatggatgggagtcactgacacccctgccctcctgagcctcccgcctgcatggtctcatttgatccttagagcaacccatgaggaaggtgtgtcgttatcctcactacggatggggaaactgagtcctagagagtcgaatgacttaaagtatccaaggttgtatatttcataaggaatagagactcggtttgctctgcagccaggcacccttgacactaggccctctgtcctcctgcccgctcgcagctgcaggtgcatttctgtagcattcacttgtgtgcgcgcgcgcgtgtgtgtgtgtgtttaatcccagggcccactgcactgcctgcctttgtgtactgcccagcccattaccctggcagccctagccatgcagcatgtcttaaaggggccccccggctcctgcttgcacactttcagagacagggagcccactctctctaaaaccagacgagcctggcccattcaaggacagctgtgactgagctggaagtggcctctcctggtcccagccttgccctttggggccacacagggcagctccctctgagctttcgagatttggagggtgaccctgagccccttattttccgaccaaacaatcccactctcaattccccccacccaatagttgggaacacccttgctgtgtcaagtagggatttttaattactgtaagtttcggtttggggtcctttccctccttggaataatgagtttgctgagcttttgtgtcaccgaccttttaagagaaaaaaggatcagagttgaaaaacagcttgtgggttggctggaacgctatcagataaggctaggccccaggagccaggacagtgtccccattgttctgccaccagccctcacaatgagctgctgttgggccctggcgctgtctctcatagcagctccccgtgccttgtgcccacgtttcctgggccctgggcaggggctgccccatccctgtatcccccggtccttccttccccacctggagtgagtgggtcacagctagtgggttagctggctgtggacctttccctgctgcccggctgctgtggacctttccccctgcccggctgctgtggacctttccctgctgcccggctgctgtggacctttccccctgcccggctgctatggacctttccctgctgcccagctgctgtgggccacccctggacgatggaaaggccaagccaaggctggtgcagttagtcttgaactccgctgaactgggttcacatctgactcggccacttgctatgcatgtgatcttgggcaggtcacctcaactttctgggtgcacctttttagtcctgacaggattgtcacgagaattaagtggaacaggtgggagattgtggccctgagccgggcttaggtagcgtagtgtgagctgtctgtctggagagaccagggaccactttgtggtggtgacattgggctggcccttgaaaactgaggaaggactttgtttggcaaagaagtggagggagaggcagaatggacaggctcaggagactgcttggacatggacccctggaggataagagtttgcagctttgtcaggaagtagctggggaggagagtccaggtcacttgtgcgaggggcctttcaggagggctcggacaccagcttgaggcatctgggacttgattatcttacaggccatgaggcgagagaggagggacaggagtgaggccatgccaggcggagtggcttgttcagtggagggtgctgctttggtctagacaggagaaggccagtggaactcccattcccctctgccctcccatgccctggccaagctcctctgtagcagcggagtccagggcaggtcaccctagccatggccttggctgtcccgtgtgtgacctggatgtcatggtgccacctccttcctgggagcagtaaggattccatgccatggaggacaggtaaagggtctctagtccctggagcgctgtcatggggctagtgatctgccatgtttagaagggtctcggctggggccgtggggagcagtgtgcagccacagagggtaggatgagcctcctaaccttgagagggatgggggaagcggcccatacttggacagagcaagggcaggggcatttcccggagactctggaatgaacattggaatgctgctcttgggacttggccttgaacaggcagctgccctgacgacccaccctcaggccttcttcgtccctcctccaagggaacaaccacgtcaccagggtttgcaggctgagggagggctatccctatccccactgacctcccgttccctctgagcttagctgaccttggctgctggtgtgttggggttttggtccaggaactctaaggctctggaccttggagccagccagacccaactttacccacaaggagccccctgcctgacaaggagccagttctgtgacagaccttcccagcacagcctggatatggctgtctgcccagggagcccaggaaggcttcagggaagaaggggcactgaagctgggtgctgaaggttgggtaggaaggggaaggacagcatgtgcctggggccctgcctgagactcctgcttcctgggatggaggggcccagcaggcaggccgctgcgagagtgggcctggtcaggtggagcagggaggtagatgccagccagtggctcagagtgccaagttctggggctggcattgaatcccgtgtggtctcaagaggggatcccttcacccccacaactcaaagggctgggaaatacctccccgtgaaggcgctgtcttcacagcactttcagcatgtgccggctgccagtgttttctgggtgaagcaagccaccttcctcctttttcagatgaggaaatggacccaagaggtttgggtgtcgcagcaacactagatcaaagatgggatgctggggcacatctcttgccctccctggcaggcctcagtttctcccctgtaaagcggggtgaggtcagcatctgcctcttgggctcgtggagattctgtgaggtgacttgtgtggtggttcatgtgacgcatggcccaaggtaagcccggcctggggacgccagctccaccctggtgggaggcaggcagtgtggagtccacgccctggtttgagacctgcttctgtaggtagtagaggtgccacatcctggcagggttgttgtaagaagtagctcagacctgggccgtggaagtgatttgcaggggtggaatccccatgtgaaggccttttgccctccttggtgccacctcgcctaggggaccaaagctctagtctccaaggaccacaagaggtcagaggggaaagctgtcatgagactgagctaggcacagggtcgggaggatgccgtgggccatgcaattgggccaccttctcttccaccccagccttgggcagcagagagggacttgacccagggctgggggacggcagaagccctgaatacaggggcatcagcccccagataccacaccacatagggtagctgtgggcatggctcctggactgacctggttcccatcccagcagggggccttgggcggctcaagtaactgctcctccctgagcctgtcatacctttctgtaaaatgggtagatgaatactcctggcagggctgtgtgctgttgaaatatgaaaaaagggatgtgcaagtgaccagctgggcgctcaccttgtgctgactagaggtgggtgcctacaggcatcccttcctgggagtggaatgggagtgaggtagagaccagtgcctgcttccctcctttcacctgagcgtcccgggtagggaagctgagcctatccctgcccctttggagcctgggcagtctttggtacccatcttctgccctgcctctaatgcgctgcttccctaggctggcaaggcagaggctggaggtgaaaaaggaagtggcccaacaatgccagcatgggatgaagccagggtaggggagaagcctgccttgggtgactgatggagcaagcagtccctgctgtgaagtggccagggactgctgcaagcacaggacagggctggcttcccagagaggtggttcttgggccttgaattggtcctgctgggttcaggaagtgaccaaatgaccatttttccttccttagccccctcatcttatcagctaccaccatgggcacaccctggcagggtcacagcagaccagctccctctgggcccagatgagggagggaccgaggacactgtgtttcagggcctgtagactccaggctggtcaggaaggaaacgcataggaacgtgagtgagagagtacgggtccactggccctgcctccaccacccacccgcttgctgtactatccaggaaggagtagcctgggagagcttgcgggaaccacttggggcctccctgggcctgccctgcccctattcctcttcctcccagagagcttgggctgcagggatggatgcagcctctgctttacatcccaccccgtggagaagctcccagggaagcggggagggtcatggctgcccaggtaggccgggccagtccaaggtgtcttaagggccttgagcttccctacagccctctcttctgccaggatcctttccaggtcagccagagcatgcttgtgggacatggtggggaaggaaggggagggctctgcaaccacagactccaggatctggctgttttggggtctggcctgggcctgctgggctcctggggttgcaggaccagggtctccttgggtttccctgggcaggcccagcctgctgaagcatgcctcgcctctcctctccacagccagctcattcatgcgccccaggcaggaggcggcctcagctcaccagctccccgctctgtacttcctgggtccctaccccaccctccctggctcccagcatccttacctggcagagattttccaagctaggccagaaagcagcccaatcccagccagtgtgacttccctactatcaggcagggcgtctcttccactgaggtatgaagccccatgtgggagggaggcctggagtccaccctgggaggtgggcggctcaggtggaatctcagcccagggagggcaggcccacccacggcactggtcattgccgtgatggggaggaggccaggccgctcgagcaaggccttgagggattatcaggagaagaggcctgttccaacacagcggtgtggcggtgtgatgtggtggtgtggcggtgtggcgtggcaggtaggccagtgcccctttgtgaactggacctcccagggagagtgcctcagaggagcagaggcacatgctgggcttgtccatgggcttaggccacaacgggaagccccaggtgggagtccttgtgggagttggggagggttcccccctgtcttgaacttgtctcacagttttcctctggctctgcccattccctctgctttcagaggccagcttcgtgctgggtgtggagaggcagagggagccggttgactggggctcctgggctggcctctgtggggtatctaagggttgggattccctcagctctgactccttacggcatctagcatgggactccatgttggggagggctcttatgctcagagggctgttgccatggagatgtggagcttggggtgggagggtggctactgtcagcctgagtccctctgagcagggctcttcctgctcacctctggattcttgagcacccatggagtgggcctcagcccgctgacccggggcagtcgcagaaatgagtgtacagggtatgcatcctacagggaagtgtctggtggctctgccaagctgcgagcccctcaaggtcagggaccaagcctcagcatagcccaaggtaggggtcttggtttggcgaggcagggagagaatgatggactgagcacttggaccattggaaccaggagccaaagggcatagggcgttgggggtaggaggtccatgtgggctaagcctggagtaggtttttcaccaaccccagggtttgagccctggacacaagcagggctcagcttctgcaccagagatggtcttagcaggcccagcctgtcctcacgcttttcctctgtcccaccgtgggggctgggggctctaagaggacactgctctgtgctgctgactttggagagactttacctaaccctagagcaggtgtcatctgcggtgctttccctgtgatgcactgaggaaacaggctcagaggagaacgatttccccagggccacacagcaggggagcagcgggcccaggtctggtctgcgtttgggtgccgggtggcatcagccctgtgctctttgtgcctgtgtcggagccactgacctgggccctgagtcccagcatggggaccccgatggagtgtgtgtcttgggtactgtgcagagactgctgcatcccttctgcttcgagactcgcctcgcctcgctgtcctcatctgtaagatgggagcagcagggtccctgtggctttccctcgtgtgggtctgctggtgtgggacagtgtatgaggaagggctgttggcagtggtatgctggataaatgttggggcagagtgactgctcagtcttggacaaggaccagtgcaaaagagaggggaaatgggaaagcgcccagaactgcagacagctgcctgggtcaggcgggctttccttgggtctctgagacttctcaggagccaagctggcccaggccccgcaggctcacttgcaaatattaaccccggagtggcgcctaatcctcaccttcttgctctctgagaggctgagcccccagccagactcttgcagtcgggaggaggttcccaccagtctctgtgacagccctgcccccagatctgtcttaagacagaaaggagagagagtggagaggagtggctgcctgctggaaggggcacggccagggcagatgggtgggacatggcaaccagcttgacccgggctgtgggggcccacctgacacacctactgccaccccaggtcccatctgatgccgaggctgaaggagtctcgctcccacgagtccctgctcagccccagcagtgcggtggaggcgctggacctcagcatggaggaagaggtggtcatcaagcccgtgcacagcagcatccttggccaggactactgcttcgaggtgggtcccatcacaggggttggggtggacaccccatcctctcctggcctggctggtctcctccagacatcctcctggagtccagtctgctgtggcctcagcaggggccagggtcttggggacagtggctagtagttaccgatagctttcagctcctaagagacctggtggagctggggtggaggctgtccttcctactctctaggttctctggaaatgggccagcacctgttctccatgctagcctgaagctgctggggcccccagtggatgacagtgagtaggggaaaagcctgaatttcttaagcaccagagcccatgtcttagagcctgctcacctcccaaatgcagtgtggatagcagagagtctccccttgtctgggcctgtttcccactgtgaacaatgagagcccaaatctgtcctgccctggcattctgcgacctgaggtttgaatgcagagagccagtgacccacctggggatgacctgtccagtccctcataggaaatgggggatctgaggcccagagaaggcacaaagacatcagaggtcacacagcaaggctgagaccaagccgggagcagggttactattgttgcaggtgttcctgggagttactaattgcttctgcagttattcatattgcttcctaccagtttctgggaagattcctacccccaataatcatgcataactaggagagctctcttgtagaggaatgagcctggtaatgaaaagcagccacttggggactagtgtgacaatctcctggcacccccagccctggggaaaaaacagaatggtgcctggcacctgccccataccctgtgcccactggggaccatttctggttcaggactcctggccaagccaggcttgatctgggttctgacttccttgccagggatagggtgaagatggccctgtctgctggttcacagcagggggttctgtggagggtgcaggccctcgaatgccgtgtgaggagtgtgcttcccctgcagagacccgggtctgctgctggggacagtggaaacacacagcaggaattgcccggactggctcccttacctggcaggagatgtctaagctggaccagaggttgagtgagagtcagacagagagggaaggagaagggtcagggactggggaccctagggcctggcacatccagacagtccgagtctcatttctccagtctggcataaaaaatatcaggcttatattaccattgttgtcactgctgcttgacggaagagaaccctcagagttgtcagctgaggactgaggggattctggtacctacctttagttgtctccttggttcttgtggttccgcctttagggaaagtacgctcgggttaagcattgccctctgacctgggcaaggtcttcgttcattccctcttcccatctcagggagagggaggttagagttaggaagatgctttcctattggacagagggcactgagggacgagtgaggagcctgctcgtgcaggatggggccactctccggctgctgacttgccctgggacagtggctctcaagtgtaccacctgcaaaacatgaagtagaggcgtcatatgagccttgtcctggctccttcctgaagctgtgatgcagacctgatggccagagtcccctgagcctccaaggtcttcttccatcactgcctgcccttgctgtggtcccttccctcataacactgtcttgcctgctccccacaggtgacgacgtcatcaggaagcaagtgcttttcctgccggtctgcagctgagcgggataagtggatggagaacctccggcgagcggtgcatcccaacaaggtaagcctgcgcccctctcaccaaagcatgggggattgaaggtaggctcagataggaggaaacaagagagactatctctgtggtgtgggctgggattgggggtggtcagcctgcatggaggcagggcccgagtggacaatattggtggactctgaaagagacgtttgagttgaccaggttgagacaggtgctgtgtgcctctgttttctaagctacacattgaggctgggcttggggaaatgagtgctggaccctggggtccttctgctgggaccccttgtccctactccccagcccctggctgagttctgctcatcttccccttccaccttagatgtctgcccctcctccaggtgaggacccctgtcccaggctggtgccctctgtgttcccactgcccctgggctcccccattaggtcctgggagcccccactgtaatccctgcttctgtatctgtctccctagccgacttgagggcttgaccaagtcctggtcaccatagccatctcttaagttacagtacagaccagcatattaaggaagagttaataatggcatagcctgtgacgtgtcaggcgttgtgctggcctctctcagtctcgccctctatgagatgggggttttaccttagtgccgtttcatagacaagcaacccaaggctccagttaagttgcttgcccaaggtgagtgagcttctgtgaggtcgaccagagatccagcccttgtccatcatgccctgcctcatcctgacttagggcctaggcgcccgctgccgcctccaccttcagagctcctcctgggtctgaggactctctcaggctctgggctggttgggggttgcacgtggcacccccagctgaccaccctggacccccgtgcacatacaggacaacagccggcgtgtggagcacatcctgaagctgtgggtgatcgaggccaaggacctgccagccaagaagaagtacctgtgcgagctgtgcctggacgatgtgctctatgcccgcaccacgggcaagctcaagacggacaatgttttctggggcgagcacttcgagttccacaacttgccgcctctgcgcacggtcactgtccacctgtaccgggagaccgacaagaagaagaagaaggagcgcaacagttacctgggcctggtgagcctacctgctgcctcggtggccgggcggcagttcgtggagaagtggtacccggtggtgacgcccaaccccaagggcggcaagggccctggacccatgatccgcatcaaggcgcgctaccaaaccatcaccatcctgcccatggagatgtacaaagagttcgctgagcacatcaccaaccactacctggggctgtgtgcagccctcgagcccatcctcagtgccaagaccaaggaggagatggcatctgccctggtgcacatcctgcagagcacgggcaaggtgaaggtgcgtgcaggcccctcggctcctgacacaggctgggcggcagcactgggttacctgcccttcctcacatccgtacatttcaggcctaacagaggccttggaggcaccggtcactaccagaagggctccctaaacccaaaagttctatcgtgggctgggggttttgtactcctgctctgtggctggagctgatcactgaggcctgtgtggagccagtggatgggattgcagctggtagtgagggagtgggcttgggttgaggtgccttccaccactgctgcagaggaccgaccccctgaggcgccaggggaacaggctgggtggccacggctctcccagcacacaggtcccacaacgccaccagccgcagtgagccaaacacacgtcccctgtggggtatggagttcggcagacctccccagcacgatgcacagatgagcctccctcacagctctacctcaccccacactctcacccagacacacagattgtcacacaggtagacacagtcaaaattgtactattcgagggttagccagccccaccccagagcctcacagaagcgggaatcgtctgagacccacccaggcaagtcctagttcagggccagaggtgctcaatgtccatctccatgacccctttcaccttccgctcccgaagatgggcccagcagcccaccatgcaagccgtgcctcagccccacctacccggtttggggacaaatgggctcctggaccagggtgcccctaggaaggcagtagagcatggtctgtgggcctcgaaggcgaccttctctctttacatttgccacctgccattcaggaagctggccaaagagggtgggaaaaaggggctggacttgaggcctctgcagcgtggatggaccctggtgctgggctaaggactgggcctctgccctctggacagtggcgtgttgtgagccaagtggcaggtggctgaggggcaccctgtgtcaaggtcctaggcccttagctctgggtcggggaggcacagttgggagccataccccagggcagagtccagggcacaagactcgtggaggtccctcaccctctcacctgttcctagaggccctggaaggggaggccatggctggaagcctcagcagcctctgcagcccccctccctcttgcacttgctgtatgctgcaagtgcagggctggggcggggacctcctccccatggacccgcgatggggagcagttttcctctgtagtgctcagctacctcctccctcaccttctcccccagccttcagacttggctggctaggctgcacgttgggccagctctggctgccccgtccttaacatgctggtcaacactggggacgtatgctgggaaacggaatgaatcaaggacccatgggcaccagagagggagtgatgggggctgcagaggctgcattattttctgcagttgtgtctgatgtttcagtacctggttcccagggctgggctggggctggcctgggaagcggattcctccctgaagcagcctgaaatgataggtatgtccaggtgctcgtggagggaggtgaagtcagggctgcagccaaccccaaaggccctcagtgggattggggagcagtagatagaagcatagaaagtaacttgtgctgctggggtgacaggtacctaagcccccacccctggaatacttgggaactagcccctcttccgtctccacggctagaggagtaacggagtctgggaagcaagggacttggaccagatctggccccaggtggctgtgtggccttggacaagtcattttcctgctgtgtgtgcattggtttcccccttattgggtcctggctctcaggaagttctcatcccagcactggggcctggctctcattgcgggagttcaggaaggctgcagtcctgagcgggagccctggaggagccccgggggagatgcacctctgacccccgctttagtgtattcagagaatgagaccctggaggtcgcctgctggtcaggaaggggtcctcaggccacatgatccccaggaagccaatgacagcttcccctttgcccctgctgtccctctgtgcctctgctgtgcaccctgggttcctgtgtctagatctcagttctgttttaaaggaccccaaggtcgtgcatgtcggagtgaggaatttcttgagcacagatgcctgggtccacccctcctgggcaccttgcaggctctgtgctaggtggccccctgccctgactgtcaccctcccttgaaactatgacagtttttcctattttcttcccctcccccaagccacaggttagttgtgagcacaaggaggtgggggcttctgagggagggtgttagtatctgcatggttgctagagtagggggaaggtgtgggttcgggctcctgtgctggggttttcccacaacactgtgtgtgggacctgatgggcctggggctgctaccctggattgccaggtgggcagtggcgcctccaccttccctctccagccagttgcacatcacttcctgctctcacctgcctgagcatggtggctcacgacctccccgggcagtggggctgcacagaaggcatctgtgtctggtgtgggagcccccaccagagtcataggtggatactgatggccattcttaccatgagacagggcagcctcatttgtcctctttggcactgatggtgcggggagaggcgagtcctgctgtggtcaccaggccaggcctgatcagggctgtacatggaaatgagtccattctctgtggtggtgggggcttgtggctccacgtggcatgctctcattcaggctgcctccatccatagacccggctctactgtcaccagttctaggctcctaccctggctgggggcccctgccctgcccacactccccagcagcccccaaaggtgggcacactgttcctctccgggacccccgcagcttggtgatggaacagcctcaaaatgccaggacttctctggctaggtctggaatcctagggccctccatgccaggccagctcaggtcctgctctctccacctcctgcctccccaggacttcctgacagacctgatgatgtcagaggtggaccgctgcggggacaacgagcacctcatcttccgggagaacacactggccaccaaggccattgaggagtacctcaagctagtgggccagaagtacctgcaggacgccctaggtagggagtgggccagcagcagggcagagggtggggcagggcccgccaggtcctcactccccactccctgcccacttgtccataggtgagttcatcaaagcgctgtatgagtcagatgagaactgcgaagtggatcccagcaagtgctcggccgctgacctcccagagcaccagggcaacctcaagatgtgctgcgagctggccttctgcaagatcatcaactcctactggtcagtgcggtgcccaggtctccccaccctgtcgccttccccatcctgtccttcagtgtctggcacccgcagtgtgcctgatgctgcctggcccctgagttgtactgacttgccagtcccctggcctagtcccttttgagctctcaggtggggcagcgttcagcatgttgctgtggttttgtgatggaaagaacctggacacgccagtctgccgtctctggtgatgagggagcgcccttcatgtgccgggggctattgtgggtgcttgggctgcagcgggagtgagactggcaggccctgtgtgggcccccacttggggtgggcggatggcttcacctgaggctcctcacctgtccgtgggagctaaggtgctcatgtcacagccttgtgatggggccaagcaggggcacgttgggggcctgagcaccaggcaggcctcttgctgggactagagaataaacagaaaggactagactttgaagtagaacggggtctgcagactctgccagccccagaaagcagcagggcatgcagcagtgggctgcttagacaggcccctcagcaggaccggaatcagtcccggagaaacttgcggtaaggccgacttcacggccaccagcttgctcctgggatatatgtgtgtgatggccagccagcctggtgccgagtatagcctcgttctgtggtggcacacaggactgtgcgggagggccttgctgtcagcccaagcagtgggttcatattcaccccagaggagctgcccaggtttaacctgtgtccccctccagctcagggcttacagcccccacccacccaagcctccgtccacagcctgttctgacaccactctctccccggccttacctcactccttgttaggttcatctctttcactcacctgcaccttcccctgcatacactcctgcccttcctgctccgaggccacacctggtaccctctgtcgcagccctgatcccatcaggatagggttgtgcctgtgcctaaaacatttcctgtgaatgctggggcaccctgggggcaggtgagcccaccacctcaggactgggcacacaggaaggccagagaagtgtttgctgctccccaaggacaagaaaaggcagggggaatgggcaggccaggagggttggcacccagggccttagcccctgggctatacaaggtgcttgcctgggccaaatgggcacctcaagatgggccacaaatgtgcagctttccacacccctgggccggtggaggagagcgactgtagggccttgaactctgggaacacacttcccattcccagctgggctgtgctttccccctccccctcttccaggggggctgggcatgtgactcagggaaaacatatttgtggacagtgattttccatttcctctttctggcatttatcagaggcacctctccattctggacaaggccattgatagatgtcaccactcaacacctgccccctgtccagttctgtgccaggcactgtgagagccacggctaaaggtggctcaccttcattccccgctaggtgtgcccttgatgggtcagccagcatgcattgcaggagagcctgctgagcaggctgctgggcctgtgggggaagaaatttcaagttggtcaagcctgttgtagccttggggttttagccttacgatggctctgtgagcttggcagggcaggccttgctctcagtttaggggagagaaaacccaagccttccaggagggctagggccttggtcagatcaccctgagctcatggcagagccaagtgtagactgagttcacggaccactggggcctggcctgccccaggctgggagatgcatcttttagggaaaaaagataggaaacccacttaagggttggccaggtgggcctgaccatggcaggccaggatgcccagtggaaccaggagccccattgtctagggccagctctgccggcttgctccatcaccctggggcagtcactacctccctttccctccccatgtagagaatggagagctgtgttgtcccaccgtgttcaggggtagtcccatcttcttgatctttctgagcttttaggaaatcctggattcctgtgacattattcaagcaaaggaaattagtctcaaagccagtgatgggaacccaaggaatagtggtctattcctgttttcctcacttccccctagacccagatgcctgctgtttgggttgaaaaatgaagtagacactggcagagaggtggggagggcccagaccagaagctggagaggtggttcagcactggcccttggcagttaattccggttaggacggagagccagctcctcatgcctcctcccatcccacctgcccggcccttcactgagaacccactgcccgatgggagcctgggtctccctgctcctcctcctgcctgggcacttgctccagccaccctgtattgactgctctccccagatggctgtgtcctcagagctcagacagcggggctgacctcacgcagctggcggggtagagccaaggttggaatgcaggttcctgctctgtgcactcctgtcctgggcccctgcctgacagccaagcccacctttgtctgtccctacacagtgtcttcccacgggagttgaaagaggtgtttgcctcgtggaggcaggagtgcagcagtcgcggccgcccggacatcagtgagcggctcatcagcgcctccctcttcctgcgcttcctctgcccagccatcatgtcgccctcactcttcaacctgctgcaggagtaccctgatgaccgcactgcccgcaccctcaccctcatcgccaaggtcacccagaacctggccaactttgccaagtgagtgcctcctccctcaccaggcagagttgggcagggctggtgtccacagggcaggccctgggggtgtttctgcccccaagctgagcagagaccataaacaggccctggttttgtccctgtcatcctcagtccttctccttcccgctttttaaaaaataaaatctccacaccctgtccttctactcaaggtatatgtcattttggtatgtttcttaatttttaaaggtgacgacatgagacatttttttccttctgcttttttgaattaatgtattattataaggattctcacatatcccttaacattcattaagccctgttttgaaataaatgactaatattcctccaagggggactggcccatatttccttaatccattccctgtgcttgggcacttgggttgggcaccaccatcctggtgtcaggctatcaggatgtctttgctgataaagcactattggtgtttttggctgcatccttagagcaagtgggcagaagtagaagggctgggtcgtctcactgttgttcattctcaaaacatagattgagccccatcctggggccatctgtgtgctgggctctgacggcaccaagatgaatcagtcctggtggcgctcagcacttcagccagggagacgtgtggaatgagcaggagagcagtgatagacacacacgagcctcttaggagggctctcagcttgttgggagaggagacaggaaagcctccagggtgacatgatcccccaactgcatgtcagggtgaggcgttcattgtctcaagaggagcagaggctgggcatcccagggagggccatgcactgtgccaggtcaggagaagcgggcgatgagacctaagaggacagcagggacctgaaggccagacagggctgtgggagccaccagagggttttaaacaagggagaggatggccttcctctgttctggatcctgaaaagctcaccctgacagcagtgggcagatgggttggagggagcaggatggtagccaggagacgtgaaaggagagcatagctgtggttccagcaacaatagcagaaaattcgcagggaggggagcgggtacaggaggcagtggctgcaagggacaaggttaggggtgattagaaggcaaaatcagtgggccgtgccatttgggaatgaggaagagggaggagttgacagctgccagagattctgtctcaggtgtatctgtatgggtagtggggtctccacttagggtagggagctcaggaggagggcatgggtttgggtgttgatgatgacttcaggtgtggcaggctgagtaggagggactcccaggggtggtgcctgcagatatattaatacatgcctgaaagctcattgggagacctgggttgagcagggattgagcatcatctgcataccagggcagtgaaacttggaggaaaagccgaaggacactgttaacaggcagtgtatgggggacacagaacattccaggtcctgagataaaaggttcagaaaaggatcgctggacttaccatgagcaaggagggccctggtgacctgggtcagagcatattcagctgacttggggagtgaatggagtgggagcctgccatagtggggaaagcgggtggtggtgtcccagtggagggagttcctgggcagggcctgcctgggcccagtagtgctcacccaactgccctctctccagatttggcagcaaggaggaatacatgtccttcatgaaccagttcctagagcatgagtggaccaacatgcagcgcttcctgctggagatctccaaccccgagaccctctccaatacagccggcttcgagggctacatcgacctgggccgcgagctctccagcctgcactcactgctctgggaggccgtcagccagctggagcaggtgcctgttgccgtggggcggaggtggggccaaaagctgccatcaggcttttagtgttcccccttccagagtaaccatggagggcagagagtttgcccaagtggcatgatcaggccaggtcctgtcagaacacactggggatctgtgggccccattttctctgtgggcaaatgctatgttcactcagcagtatctgccaaggctgccccactctgggtactagagctggggtgttccgcatgcactcagcctttagtggacaagcgccactgtgctgcctgccagagcatgtgagaaatagaattggatcgtgaatccgcctgtatgaagaagatgactcaagaccctgtacctccacttgtccagcaggaagtcgaaaacctttctaggattgcccttgaccatcagttgacaaggttactccctagacacctctgacactgctgcagtcacctgaagtgagccctccctagcccgagacttcactgacccccagcctcagcccacacagtgagcaactagttcttggacttaagggctgggtctaccaggaactacttcccgaatatctgttgctttctagggctccaagggaccaccttacttttgtaaggtgctgaaactggcctggaaggcccttcatgcctcctggtcccattccctagaggtgaccgctcagagcactggtatgcagccttctggacacgatctgtgcatgtgtaagcgcacacacacatgcaggcgcacacacatagagctcttttccttcttcagtttgttttaaagcaagaacatactgtgtatgctgctgtgtgcatttcttaccactgtgttgtgggcctctttgcttgtcagtgcaatctccaccacccccagggactttttaatgactgcattgtatgaatgctatttatttcaccagtcccctattgatggacacttaggttagtcctgacttttcactagaaataggtcctgttgcaatcaaaggccatcatttttgctcatttgtatccacttgcctttggctgtgagagacacaggagggagaaatggaaatgagggctgagaccctacattccacctgttccagtccctgcactgcagccaacactagtcactgtcactgccaccacttacctttcccctgtgctgtccacgtatctgcacaaccaggcaggaagaatggaaggtgatcagtattgtcacatcggtgatagggtgcaacagggatttgaaactcaactgtttgcctctcaattgcgtgctctattgcctgcatgagttttcacactttgttttctcacagagacctctgtggaagcttgtgcataaacaggtgaaggcagtgtccccaaagcctagaatcctctgccccttaagttctctaaagcgtgccagcaaggttcagatgggttcaggcactgccttctgcctgaccagcacctgagggtgcctgcagtgtgcttggaccatctccactggggctcaggtgccaaggtgggtcaggccccagcccatcccgtggagtaagtgatgtgagaggggctgtcacagaagcctctggatggagaggtggaggtgtggaaatgctgggattccatgtgtgctttcctctctgcggaggcaccagggcagggcaaactgaaggagaggcttgcactaggtcagcgtctcccactgtgggcctcctactcctgccctagaaatgtccgggagctggttaaaaatgtagatttaccgattcctgggctcacccccctcccagacccagtggctctgactggcagcaggtggggatctgcacttctgacaggctccgcagtggttttgagccatagtggctgcagcacatacagcctacccatgtggtcccaggaggtcacacctgcctcttgctgtgcctttacagagcatagtatccaaactgggacccctgcctcggatcctgagggacgtccacacagcactgagcaccccaggtagcgggcagctcccagggaccaatgacctggcctccacaccgggctctggcagcagcagcatctcagctgggctgcagaagatggtgattgagaacgatctttccgggtaagagctgccagccatgttgggtgtggtgggtgcgtgtgcagactaggcacagcccatctgtaatctcagatggggaaagaggatgcctacatagtgtttataaaacaagcctggcaagacttgagttgtacaggtcctaagtggtgaacctccatttgggaaaaatcagggaagccttcctagaggaggtgatgctataggtttgttttgttttgggaaaagtagcatttccattggtggaaaaggcattctagacagagggacaagcacaagcaaagacatgatgtgtcagagaataattgctggtcccaaatacccccagcatttccagatcccctgatatttgttaaaaatacacatgttcctggtatttcctgagcctgagtcagaatctccagaagtgtttagttgggggtgttttcaataggaattcggtggctctgccaggctttgaggctgggaacagcagaaaacataaagtgatgctgagacccagtcctggggtctgctctgcctaaataagacacacacggcagagtggaaggcaaaatgttcttgtttaagtcaaaatagagacatttctatcagttcatgttgaagcatttctgctctacccctactctcccctctcccgccagtgatccttcttaccccagcatgtgaggccgcagctgtagcagcagagttgggagtgtggtctcccccaaggtggtggcagggcaggcttttaagcaggggagggtgctgagatcaagaacctggggttaggggagcccaggaggggccagagatgcaggtccactgagtcttgcattgggtctgttcagtgagtgtgccaagtgaagacaagcagagtcacatgccaagagtttggagtggggggtgcagtagacagcccttgagaggctgagaggcagccgggcccgtgagttctgaaaagactgacctggtgtgtggcctgggcagccaggcccccactgctctccgtctttcctggctcatctgctgctctagccagttctcccaggcccgtgagcactgcagcccatctcagggagtggcacttcctctccgtctgaggctaagccaacccattccccattccaagccatatcaagccccccaagtccttgcagccttcagttccccccacccacattcttctctccaaagcccccctggaccccgccacagttgtgctttcttccaaggagctagcttctggggaggggccagggagaggccagagaaaagcgtagaatgaggaggaggccagggcaagtgcagccctcccaccaagtcatgctctccacagagcctgctctcattccttgtttttgccaggaactccagcccccgcctgccagtcaaacaagggagcggcagcaggaggctgggcaagaggaggtttcaccgggcccccacttcagttaccagtctgattaggaacaagagggaagaggcagagggaacccagtgactctgaagttggggttctcaatgcaggatccgtggatagcagagagccactgagttgtggcttagggcttagctaaggaggagttttccagagcaagccaggccccagtacccattgtcccaagatgcagctgaacagggaaggggtcttccaggcagcgcggcctgaaatgtgcagtgctggcccctaaagaagaggttctgtgcaggagcagccgcctcagcctctggtccccggattctcccactcctgccaccccagcgcatccatctccccagcgctggctcaggctgccaggccccggcaggttggcgggtgctgtcggtttggacccgccttggctgcactcacagttcttcttttccccttctttccctgtgtgtgcttgtctccctgcagtctgatagatttcacccggttaccgtctccaacccccgaaaacaaggacttgttttttgtcacaaggtcctccggggtccagccctcacctgcccgcagctcgagttactcggaagccaacgagcctgatcttcagatggccaacggtggcaagagcctctccatggtggacctccaggacgcccgcacgctggatggggaggcaggctccccggcgggccccgacgtcctccccacagatgggcaggccgctgcagctcagctggtggccgggtggccggcccgggcaaccccagtgaacctggcagggctggccacggtgcggcgggcaggccagacaccaaccacaccaggcacctccgagggcgcgccaggccggccccagctgttggcaccgctctccttccagaaccctgtgtaccagatggcggctggcctgccgctgtcaccccgtggccttggcgactcaggctctgagggccacagctccctgagctcacacagcaacagcgaggagttggcggctgctgccaagctgggaagtttcagcactgccgcggaggagctggctcggcggcccggtgagctggcacggcgacagatgtcactgactgaaaaaggcgggcagcccacggtgccacggcagaacagtgctggcccccagaggaggatcgaccagcctccgcccccacccccgccgccacctcctgccccccgcggccggacgccccccaacctgctgagcaccctgcagtacccaagaccctcaagcggaaccctggcgtcggcctcacctgattgggtgggccccagtacccgcctgaggcagcagtcctcttcctccaagggggacagcccagaactgaagccacgggcagtgcacaagcaggtcagtgctgctagtcagagggcagggctgggcacttgggcccagctggggctgtcataccccataccatgctcctcctctcggtcatttcacctccaccctcacccagctgccatcccatcccaccagcctgccacatgcgccaccaccccctccccctggcttcttcctgaatcctgtgaaccagggacactgtagccttggggaactccaggctcctctgtcagtgcccctaggggcaggctggggtcagagagaaagaggaggagagtgcattcatcttcggttccaagcctgtcgaagcgcctacccagctctgcccccacacgcccctcccaaaatgttttcacaggctggacaggccttcaggcacaaccacctggagcatggatgaccctgtcacccaaaggctgcaggcagtgtctggagtggaggtgccttgggctgacagcccagcctggccctgtcccccactcagtgcagcctgccccggtgcccccagtggcagggtcactcactgtcctcttggcagcagagtgtggtgctcaggaggccacctggcacctgtcagctctgcctttggctgccgtctgagagacagttcccgggtggggactgcctcggtaggcgctcagtcagctggaggtcccctcttcccaccgtgtcccagagttgcttgtccttgtggctcacctgggccactcccgcccctcctgcttgccctccacctccctgcagcccctcacagctgtgtttcattgtagggcccttcacctgtgagccccaatgccctggaccgcacagccgcttggctcttgaccatgaacgcgcagttgttagaagacgagggcctgggcccagaccccccccacagggataggctaaggagtaaggacgagctcagccaagcagaaaaggtaaaactggaccctggcggctcgggacagggcggggctgcctcccggcagcagctggtaggagtctctcccccaggtcccccagcaacgggtgctgctgtccttgtgaagggcccgtcacctctgagcccctgttccctgtgagaatagcagtcagtggggtctggaagaaaagcaacaagagggatggattagcagcttagacctgaggcttcccatctgcagattggaatcaccagggaattgtcttggatacagactcctgggacctctgggaaggctccttagcccaggcaactgaggcagttgagcttcctgaggacctgggggttgagggctgagggtgcccaagtgacatatagaagcccccctgagggaacttggtacctgaggaggcagaggcatgggtccccaggatggctgggagagccaccccagcctggcccccaaggcttgtgcctgcccacggcctggctcttcacccctctggtctccaccagggcctgggaaagaaacagcagttaccagcttggggggtggggtcaggctgccattgagatgttttcttccccacccccgggaaaagaatctactctaaaaatgaaactctcactctgccacacactctgccatctgctggggcaaggggatgcttcgttggtctcccaagccttccagctgtggcagctgctctggatctgggggtagtttttgtctcctactgccagctgcagtccatgtagacggaggaaccagcgcaggccccagaacggcaggcgcttctccactcccctctggatgctctcgccccgctgggccccaggaaagcctgtggcaacctctcgagcaagggtattggggtcagaatggcagaactccttctccccggcctcaggcgaggcccgtctccatgctgcatcctgccaccgccaccatccccggtccgctacatccacctgctttcaccatagttacatgaaggggaccgggggacagggaacacagtgctcccagagccagagtttggctggggagtgaggaggactggcctcactccaggctttttgcatccctgtgtcctcatggcgtctggcccctctcgatcccggcgttggcctttcctcgctcagcgcagagcacctgactcctctctgcagccacgccgcttcccagcctcgtccacatccctgctcctccctgatggttggggtctgtgctggactgaggcagatccagagcctggaccacctgcctttcagttctctctctctccatttcctcatgccactgccaccccctggctttagattcaaacagaggctgggaagctgggatcttaccctgctagtcagtcgctcttcatgtgacatggtcaccttgtctgggcctcagtttcccctcctgcagagctcccacctctcagggtgctgtcacatgtccttcatgtatccaagggttttttaacctttgtcatataaaagttcaaagccctagttacaccctcagtcctgggacttgggtctaagtcttcatccccgctgtagccatacaggtcaggctgggagtttggagtggaggccccacggtggggcacaggcacgcgtctggctgcagcccccaccagctgggctccttgggcatctccttgctatgtgaagtgggcgggtcacagccactggggcctttcaagtggggctccctcctacccttcctcccactcgggctgacgaagctgtgctctctgtgtcctgggtgctgtgcccgtggacgctgccctcctggtaggacctggcggtgctgcaggacaagctgcgaatctccaccaagaagctggaggagtatgagaccctgttcaagtgccaggaggagacgacgcagaagctggtgctggagtaccaggcacggctggaggagggcgaggagcggctgcggcggcagcaggaggacaaggacatccagatgaagggcatcatcagcaggtggggcccacacctgcctggcctggccacaggcacaggcagggcagccatcgctgccttcgaggaggcccctggtcggggagcctcctcaaaggataagctgaatgtggagagaggagggaagagagtgtctgggcagtgggagcagcgtgagcacaggcctggaggcaggaggtggcctggagggtgggcagcccatgcagaatacaaagctggggatgaggctggaccaatgacagctggctcccgacgggcctgagcctctacaaggagccataccatcttagtaagcactctcaggggcgctgagaagctggattggggggtgccaggaaagacagggaggaccccaatacagggtaagaaaagtgggaatgagtctcagttacgtatagtagatgaaggtggaagacacagcgtagcccccagattcctaccaagagtgtctgggtgtgggcgtatcagggtaccagttactgagctgggaactgttaagaggagtggtttgagtggggagggagagggggatggtgccagtctgatatcctgagttttaaggggcctgggttatctgggaaagggcttcagaggaacagcgggttttaatgctgactctcatctttttgaaggcttatgtcaggccccatgttggtgcctccatctctgtctctggctctgcctatgggtagggcatccctaccttggtgtcaggcagggagtacaatcaaccccagggtcccagtcgtggagtttacttccttctcagtaataccaggcacgggaggagagacagtgtgtcttgtttgaattggcctggtctaagaccccatcagctggacagaccaagcaggtgtgcaagagccaggaaggcctctgctccatgttttgtctatgacataagcccttcccagattcctcctatttagaccacctgtttctctgttcctgactgttgtttgctccatttacttgtagtttggttcattatgaaatagttaacatgagtgaaaccagggtggctagaaacctgctgttcacttgttctccagctctgctcttggctcaccttgtgtgtgtttccaagaatggaaatgcttttcaatttaactgccttctctacattgtgtgtattctctgatatttgcatgttctgaattcagagacttgcttaacacgttcgtttctactaaccaatcctggaatatttcctccttaatgtaaatgtcagttaggtagatagtgttcaagtattccatatccttactggcttttctatttctcccttcattccaactggtttttgctttatgtacactgaaactattcttaggtgcatatacatttaggctgtttatgtactattgttgaattaattccaactggtttttgctttatgtacactgaaactattcttaggtgcatatacatttaggctgtttatgtactattgttgaattaacctctttgtcattataaaatcactttctttatcccttgaaatattctttgctctgaaatctgccttgtctgctattaatgtagccaccccaacttccttttgattcgtgttggtatggtatagctttttttatcctcctgcttttaactcattgtcttggtccattcaggctgctataacaaggtaccttagactgggtaatttataaacaacagaatatgtattgccctcagttctgaagtctaacatcaaaatgccagcagattcagggtatagtgactctctgcttcatattatagtgcaccgttgctgtgttctcacattgtagggggtgtgagcaagctcccttgggcttcttgtataatataaaagcactaattccatttttgaaggcaaagcccataggatgtaatcacctctcaaaacccctacctattaagataatcaatcaccttgggggttaggtgtcaacatatgaatttagaaggtgacacaaacattcagagcatagcacccatctatatatatgaagtgggtttattttacgggcaccatactattgggtcttgctttcgtctaaatggttctgcctttttattggagtgttttgaccatttacatttaatgtaattattgatatatttaaatctgttgccttgtttcctatttgtaccatctgttctttttttcctgccttcttttggactgagtatttttttatgattccattttctctcctattgacttattagctttatctctttgttgctctagggcagggattggcaaactttctacaaaggagcagatcaaaagtattttaggctttgtaggccatatggtctctattgcaactgttcagctctgctgttacagcagaactatttgtgtgagatggctatttacaaaaacaggcaatggtccagatttggccctcaccctgaggctgtaatgacagggagtctgtcattgtctttgttcctctgtactttatgtatctgttttccctggctatttataagatactttttttttaaatcactggttgtcagtagttggattgtgatgttcattggtgtggttttcttctaatttcttgggtcttggatttgtatgtctgcagtcccacctccccccatttctttctctgggattcctagcacacgtgcattaggctgactcattttgtcccgtatctcactgatgctctgttatcttctttcttcattttttttctgtttcttctctttgatagtttctatgactatgtcttcaagtttgctaattatttcttcttctgtgtgtaacctgctattaatctgatccagtattttttcacagcagataattatatttttcacctcttagaatttcattttgctttaaattccatcagttttaattctcattgtgcttttacttctgttttctgaaacatgtagaatatatttataataccttgttgttttcatgtccttgtctaattctatcatctgtgacatctgagtctgtttttactgatttattttccgcctgcttatgagttttcctacttctctctgtatacttggtaatttttggttggatgccaggcattgtgaatctcacagtgaggtgctgaatgtttttgtgttcctttaaatcctttctgggggctttattctgggagacagtgaggttacttggaatctgttcaatcctctcagggtttccttttaagttttgttaggctgcgtcctgcagagcctttagtcttggcctaacgtggccctgctctgagggggtttccttccccgggtcctctgtgattcccagtgttggtgcgtcactgcactctcactggtacaacatgaactgcttctgcgattgtttcgtgttctcctttctgacggttcttgcctagcctggtaattttctcatctgcatgcggatattattcagtcagagacacaaggggaacccccactcgggagctatgtggagtttctctctgcctcttgctcctctctggcttctgccctgcaaatcccacacctcttgaccttcctgacctgcctgtctcctcaactcagtgaggctgctgactccgccttccctctgcttccaggccgttcactgggctctccttgttggtttctgttctcctagaaattattgtactgcattgcctgtattgtgtccatttttctggtttgtttgtttggttggtttttaataaagagatggggtctcgccatgttacccaggctggtcttgaactcctagtctcaagtgatcctccctccctggcctcccaaagtgctgagattataggcgtgagccaatgtgcccggccctatttgtttttaagacaagagagtaaatacaatctccttccaatctaattttccttaataaaacaaataccctcctgccaccccacccccagcacaagctttcctcagagtgataccttcctgtactggggaacctgccccggagggtcccccccgccaccaccgctcctcccagttagtgctccctgaactgctgccctgctgcccccattacagtcccgtgcagaaccggccccggcacagtggctccctgtgtgtcttctgtgagtgggctaagtgcttgcccagtgtgcggtggctgctctaggctggaggaatcaagagggcagggatggagagaagccttgggagtggagggctcatctaagagtgtgtggagcaaggagaagggaggctgaggccaaagccctgtggacccccatgtccagaggcagacaggacaaggcatctaggagacaggcagacccagagagtgtggggtctcaaagccaaaggagagtgggaaggtgggagtgcccagcagtgagagtgtctcaggaaccagccaggtggggccaggagggctcccaggcagggagcagcaggacggagccggcctcctgcccactgagcttccgcgggtggtatgtcccccagctactgctcattgttctgcctgcacacctgtccttcagatgtctcctactgatgtgcgacctcccagcccaccctccagggaacgtcactgcttcctgctctttgttccagggacctgagctttccactagcgcagctgctccgtgcagggtgtagttagttactcgtgcctcctgccttgtgaactccttgagggaaaggactagagttcattcatcttggcacctcgcgtacaactttgtgaagatggcgggggcagggtggaaaaagttctagagcctttcagggccttcgtctttccaccacctgcctagctctaggggtttgaagatctaatgcccatttccacccatcttggctcctggaagaacatcgggaaaggggcagcccgggggcctctggggctttaggagcagcgagtgtgggatgtggaggtgaggaaggaggcccagcagtgtcagttgctgggagtcggctggagggcctctgccccaggcaagtatgggaggcaagtctctgacccaaggaggggctctcctagtgtgtccctgctgtgtgcgggggtgatgggcttgttctcacaccctccccacctctgctgcctccagggccagtctgactgtctctgtctctggctataggttgatgtccgtggaggaagaactgaagaaggaccacgcagagatgcaagcggctgtggactccaaacagaagatcattgatgcccaggtgggggctccggccctttggtcagccacaagagttaaagggcctgggattaggaggggtgactagcctctccatcctcagtcatacctcactgcagacactgaggggaataagaaaccagaatctgccctgagaagtcagacctgtggtcttagtgggccacaagctcactaggacaggctgtgaaaggagagaggcagctcctcccctgccagggctcttggcgggcattgtctttcaccaggactgctgaccaaagagtggaagccaccaggagggcagtgggggtaggagtgaaggcaggctggtcagagggagcagtggggctctcgttcacaactatggcatccgggctgcattgaggggagacgtgaaaggctctgtggccccagcctcctttactcagggctgcaccgctttcctttcactcacccaggagtaggctgggccttgctcaggctgtaaactgcacagaccaggagctgtgacctctggtgtgtcatgcacacacatgtgagcaagggtgcctgccctaggggccgcaggcagcccatagacagcactagagctgctgcatttgggctgataagcaggcagcgaggctgtgtccatgatgctgcagaggcctctgcctaccttctcttgccagctgctcacagcccggagcctgcctgccaccctcatctccaggccacccccttccccgatgcttgtcgtaggtatacacagccctaaggagcctgtcccatgacccccgctcacatccccattgtccacaggagaagcgcattgcctcgttggatgccgccaatgcccgcctcatgagtgccctgacccagctgaaagagaggtacagcatgcaagcccgtaacggcatctcccccaccaaccccaccaaattgcagattactgagaacggcgagttcagaaacagcagcaattgttaacctgcctgaggagggaggaagctacccaaggagagggggactatggtggccaagggcagggtctcggcctggggaggcacccacggttgcagccccagcgcgggtgtcaggaggccgagcctcccctccctgccgctgtccaggaggcggccgcagagggagccaccagagactgaagcagcgtgaggcgaggtcaccagccgctccctgtggggtgcgggcagaagagactgcacgctggggagtggggacagcctgatggggcagggggcctgccaaaaatatgtctgttggttcctgaatgtggtgtgtccttgtcctcctggatctggccgagtgcatgtgtccccccacacctgtgccagggagggggcttcctggaggggggattcaagggctaggggcctacacctgtggcttcccctcgcctccttggggggcccgggactccctggcagccaggccctgtcatgtgggacctggcacttggcagatcagttggcaggcaggaagataggaggacacagagcaggaggtcagtgtcccctgcctgtctccatccgaagcacctgccactgcatgcagcctgttgggaccttcctggctgtgaggaactgaggattcctacccacccaccccctctgaacctgtccccagagcaccacctgctaccttcttccctgccttagttgtattgccagatagacccagtgagggccatggctttttcttgtgagctcttgtccctgtggggaggacccacagcttcccacacctcccacacaggcccaggctgatgctctagggctcccagaagccagagatctgggcggatctggccagatggctctgagcactgtatctgccttctcctggggcccagcacacccagggcacagtggtcctgtagggagtgccacctggtgctcaccctgaaagaaaaggtgatccttcctctgagtgatggtttaaaaaaagattctaacgcctgcaggccctgagaaggtggataactgtgattttttttcctttcacagtatgcattagaaacaaaagcccgcttgctcgcttgctggaacacaggggccttttaagttgagcgtgcgcactgcatgggaaatagcggccctggaggatgttagacttgctccctctccaagacagcagcagcctgcacctgccccgtgtgtgtggccggcctcctcctcacccttcccggcccccggccaaggacccaggcgctgcatacaggggaggggcgcaccccacagctggggccggttttcctcagctctaggctgttctgtagcttatctgcccctcccccactttcaagacagatgagcaggagcttgggtctctctcggcccctgtctgttcccagcccctgcagattctgagcaaaggccctgggtaagaagggtgggagtggggcctttgccagcagagccagggcagggcgagctgcaggaatcacccctctgcccctgcagctggaatgtgccacagaggccccacctgaagggtggatgtgctggaggggtggcccagagccatactgcgtccaccctgagctcggggacaggtgacagtggctgctctgggaaggggcttttagatgtaacctacaattcagttaggctagagacagatgctggtggaggaagggctgggccaccagggatcacagaccacaggaagatgggaggtggaagcagaggccctgcccccaccccttcctgtctcactcttctgtcttgtccccacccatgcgccttcgtgcctgagaccagggtggccacacaggcagggcctggctccagtctcatcctcccattgcccagtgagccctgctcttctctccccagccccctcccaccgctgcctcgtagagtgacctcggacagagcccccctagcaatacagggaggctcccggggcctggacaggcgggctcggaggctacccgctgtggccggtgccagctgcccttgcagggtgggtgagctctcaggccgagagccttatttacctagtgcaaaaactgtaaaagtgtacagactcttcacagatttttatcttaattgcaagtctgccgattttgtaaatgttcttggtgtttgactgtaatgtaactatctcacctaatggttgtacatatcctttggtcctggtgctgccgagggctggccgggactgctgctctcccaagggttttattttatttctgaatctagagaacagtattgggcaggaggaaaaggcttggtgtctgcggggggtgtcttccctgcctgtggcatttgtgtgttggctttgcagctgctgtctgagtagtggccactggggtgccttcactgggccagtcaacggggggctcctgcccaggccacagagaacctgagttcccgggagctgggccctgcctgcagccagggctggggttgccagaggccctggagggaaggacagtccctgctggggaagaacagccccggggccccctggtcaccgagactcagcctctgctggagaaagccacgccctccctgctagcacagaggcctgactgacttttttgcttaacttccatgttctgggtgatggaaactgccaaacctcctgtcagtgaggactctttccgactgcccagaaagtgggggtggaggaccgaggctacagctccacacgccccggtcccccagagcatctgccccaggtacacctccccctgcgccccgcacgactgcgggagccagactgtccagggaaacagcctctctcttttctacacactcagccacaaagccccccagctcccacaccgcgtcccagctcccctcttttgtaagtatgtgaaaaggaaaaaatgcaaacgttggagtttgggctggagctcctccctccagctgcgacttttaactatgtaataatgtacagaggaagctgttggtgttctaagactctgtgtggctgtgcaatttctgtacatttgcaattagaaatattaaagatttatttagctattttaa

SEQ ID NO: 15541 - DNA, 51300 bp, Homo sapiens
aaacccgcggcactaagctctctctgagaggcagaattgcgccggccgccggcgagaatctgcctagagccgtccagccctgtcggccggggacgacagccgcctcagcctgtcaggacagtgaggagagcaggggccgagtctctcggaagccctcgtgaggactcggacctattcggactgattcggcttcccacttcggggaacttcgaccctcctcggttcaggactcggtctcggctcggcggcttcgtgcaggttcggctcctactcgggcagcctctgttcgcctcggctccgctccgcgggcggactcggctcggctctgctcggcggctggctgccttttcggtccctattcgggcggcggcttcgggcggcctcggcccagctcgggcgtcctcttcgggccccgcttcgggctccgcgaccggcgcttcgggcggtcccggacggcgccttcgggaaggctcggcggagtccggatggaggactcggactcggcggcaaagcagctgggcctggctgaggcggcggcggtggcggccgcggccgctgtggcggcggcggccgcggccgcggcaggaggcgaggcggaggagccggtgctgagcagggacgaggactcggaggaggacgcagactcggaggcggagcgggagacgccgcgggtcacggcagtggcggtgatggcggcggagcccgggcacatggacatgggcgccgaggccctgcccggccccgacgaggccgccgctgccgcagccttcgcaggcaagtgcgcccgccggcctctcgcctcgtccggttcccgcgcgcctaccccgcgcgcctgccccgcacaactgtcccaggtgaccagcccgccacacctgtccctcacacctgctccacgtgaccagcccgctccacccgccctgcacacctgcccctcacacctgctccacgtgacccgcccgccccacccgccctgcacacctgccccacgtgactagctcacccctcacatctgcctctcacacctgccccacccgcccctcacactttccccacgtacctgctccaggtgaccagcctgccccacctgccacaaatacctgcctcgcacacctgctcgacgtttccagccttccccacctgccccacgtgatcggcctgccctacctgccccgcacacctgccccacatacctgccccaggtgaccagcctgccccacctaccccaaacacctgccccgcacacctgcccctggtgacctgcctagcctcacctgacctggccctgccctgcacacacctgccccctgccccccttttctttgtggcagccccgcctcctactggtcccccctgtgcagctctgcccctgccctgccttcgtccatcctggctccccccacctgtcctggagaagccctggggtgggtgggcacctgtggtcaccaggaaccccccacttcctgagggccagttcaggcatgacctgagcgctggggagccaggggtgggcagcctgctggaggccatgatgccagaggtcagcgtggctgtgtggtggcccaggggggctgcggagccacctgtgcaggctcccctcccagtcctccctcttcctcttgcctttttccctaaggacctgctcctcctgccccgcttcctgtcgggcttcctttggggaggctgctgtggctttccagtccacatttttatataagctgcttatagtttcttgccacacaggtcagtctccttctcaggctccaaaacactgggagcccgtggcagagctcacagatgccctacggggctggtgccgtccacccacctcctgtgtcccgcccttgtgtccgtggggcatagacttccccacccactggcttcctaacgcactgtattcttccccattggagttcccgagtgtcccccagggactcacagctcagtgttgagacccttgggaggagcttcttgttgcgttgtgaggcacttttcccctacggagctttgcgggttgaggaactggatcccagtcctggtgtgctgggtatgtcagggcattgcgtgtgctctgggtgcttgttcggcctgggggctgggtgggggccagcagcgtctgggctgcccttggtcagctgagtggccctcgaaggcaaaggggtcactgctgcttgtttggttggttaagaaaaaaaagtgagggaaggctttgtgactctcaggggttggcgtccgtcgctaaactctggtttgacgttgggatttggagccatgaggttgatttcaggtttttgtcatttttgcacgtatttttctgaatgcataaaagaaaaatgatgctgttcatcatgatgtcagagaaatgtgctgacgtgtgttttcttctgaaaaatatggtagttgtgttttgatgtggtaaaagcactttaatactttttaaaaattacgaacagctgacgtcaagtggtttccaggtttaagtaactcagcaggacacgctgccgcctgaggaggctttgggcggctgctcccagggctgccatgggcctggcgttgagcactcactgtggccgcgcgccgcatgccggggcttgtggtgctgagaggcgaggatgagggaaccgtgcacctggtgtggtctggtcgtggagacagacagcaaacatgcctttttttttttttgagacggagtttcgctcttgttgcccaggctggagtgcaatggtgtgatctcagctcaccgcaacctcccgcctcccgggttcaagtgattctcctgcctcagcctcccgagtagctgggattacaggcatgtgccaccacgcccggctaattttgtatttttagtagagatggggtttctctatgttggtcaggctggtctcgaactcctgacctcaggtgatccgcccgccttggcatcccacagtgctgggattacaggcgtgagccaccgcgcccggctgcaaacaggcatttttagggcagtttggtgagtgctgggttaatggtatggtcaggactcattcaaccagtatcttttaagcatctgctgtgtgccagagattgccctggacacaggacattctagaactctgggtgacagaagagccacttgcttggcctaggagcatcacaggaagactttgcagaggcagagaggagggtgtgggggtgttggcggcagaaagtgtttctctagaaacactccagcatgtagaggctggagctgcaggacctatctgggatgacaggggcaggaggtggggtgcagctgacctctgtggtaactgccctgtgtgcagatgctgctgaagggcctgtctgcatgccagggggctgagttccatgttgtagggggtgcggtggggtggcaccaagggacataggcaggttagatgtactttttaggaggaaggggtcagagaccaagggcaatggctgtgagcatggggccgaggtcacctgacgatggtggcctgacccctgcggtggaggagaggcaggaatggagctacaagagtgggtccaggaggtgtcctcacctgcggggaggccgagagctcctcgtaggcatagggcacacctgaccagcagaacccacagctgtgccgcagaaggagatagaagccccgtggtggtttgatagagctggggctggctggggtggcgggtttgttgtatgcattttttactgcacgtaaaaggctttactggggaagaatagatttcctctctttttcctggaagagccgaatgacttagacaatggaatagaaatgtaggtcgagcgtgttcatggaagtgttaagatcttcctggttacaagggcacacacctgagggggagtcactttgtttgaagcacctgagcgaggctgttcgctttgtccattctggcttttgttgcttgttaaatgaggctccttctgttgcagaggtgaccacagtgacagtggccaacgtgggggctgctgcagacaatgtcttcaccacgtctgtggcgaacgcggcatccatctcaggacatgttctggtaagctgctccgaggggcacagcccagggcgggtggtgccacgctgggggcctccggcttccccgaggctctcccggggttcagcccgctgtgtgaacgtctgctctgtgagctggggagggacgcactggctcgctctgctctcagaggccttcgggctgtgctggaggtgggagaaattacagctgaggtagaagctgcctcggaaggccaggtgaagagccacacctgtcagatgggcttgtggcctgcgttgggcagggactcccagcaggctgctgtccggccacagttcagcctctgcccgaggcccggccctgcctgtgctccttatcctatagctgcagggccagctgaaagaagcaaggcgtttccctcccccatatcctgttctcgtagcatttatggtgcagtctcccacgcctgactgctgtctacttagaaaactgctgaaagccagttgcatttcaaatagtgtctgtgccaccttcagagcccttttgtgatcatgttttatcagcttattttatgttttatgtgtggggccttcggcgatctggggacatctggtcaaccagggcaggcaaccttgtttccaagtggcagatgccagggtgggtccagtctccagaaagggattttccctgggaccattggcacctgttacttgtagtcttttcagccttggtcacatacctgggacatcatctccatatacctgaaagcagagtggttatttgtttgttttgtttttgagacggggtcttgctctgtcacctagactggagtgcagtggtgcaatctcggctcattgcaacctccgcctcctgggttcaagccattcttgtgcctcagcctcctgagtagctgggattacaggcgtgtgccaccatgccaggctaatttttgtatttttagtagagacaggtcaccatgttgtccaggctggcctcaaactcctgacctcaggtgcccgccttgacctcccaaagtgctgggattataaggattataggtgtgagccaccacacccggcctgaaagcacagttattgttagaatggcagcaaacagaaaacttgtgaaggacttcagtaaaaacataagaaacttggaaaccccctcccctgccctcccctcccctgccctcccctcccctgccctcccctcccctgccctcccctgccctctcctcccctcccctcccctgccctcccctgccctcccctgccctgccctcccctcccctcctctcccctcccctccccttcctttttgacagagtctttctctgttgcccaaactggagtgcagtggagtgatctcaactcactgcaacctccacctcctgggttccccatgttgtccaggtagtctcaaactcctgacctcaggtagctaccatctcggcctcccaatgtgctgggattacaggcatgagccaccgcacccagcccagaaacttggcttatttctggtgggtgtgagaacacacacaagctgacccatggccacgtggcgatctgtgttttcagtcaggctgctccttcctggcagtggggtctgggcacctcctcatttcctaggaggggctgaagcccaaggcacctgtgggtgcctggaacgtgctgacgtcatggagcgggggtgtcctgcaagtgcctgaggctggttttctcccctccaggccaggaagaccagagactggtgtgttcctgtttggaaactgacaacaaagcggggcacggtctgaaataactgtgtgttcccttcctaagaaaaatactctgtgactcttaaacaaacacaagacattccttttctccagtgaagagctgcaggtctttggtgactcaggcacagcagtaggaccccctgtgtgagcccaggcgtcaggcatgtgtgttgggggtccctccactccatgataaacttctactcaagtgctctgatttgacagtgacattttcagatgtaggaaacagttgtcagctgggcgcggtggctcctgcctgtaatcccagcactctgggaggccgagatgggcagatcatgaggtcagaagatggagaccatcctggctaacacggtgaaaccccatctctactaaaaaaaaaaatgcaaaaaattagcctggtgtggtggtgggcgtgtgtagtcccagctacttaggaggctgaggcaggacaatagcgtgaacccgggaggcggagcttgcagtgagccgagatggcgccactgcactccagcctgggtgacagaacgagtctccgtctcaaaaaaaaaaaaaaaaaaaaagaaaaagaaaaaaagaaacagttgttttctcactttgcctcggttggttttgtattcagaatgaaaaccttggggcacccaaaacacggggttcagagaggcccctggaagtctctggtctgccccaccgtggggtgaacagagcctgcaggccagagtttgccggatgacttggccaaggtagggttcaagttccagcagtggtgtgtgggcatggagactctggcttcctgtggcggggtctgtgccgcctgaaggctgattttggaagcaggcagcagttgcagcagcttcagccagtgtggaaatgtggttttgaggccctggtctccagttgccatctgtaaggaggtctggagggcggtcctgcacaaggccttgtctgtggcggccaactcggtctgttggaaactctgcatgaagacggtgaccttgtgggagcggctcaggtggaagggagggtgtttcttgtttgtggagcacctttcttccttccctttgacaaatgatggcaagcattttcctcagcaccacacagacttcggcattgtctgttcttgttcttggctctgttttcaagtctttgagaggtatctttggaaaagatatggggtgcctaggtgagcgtcccttcttggtgagaacagccagagagccctgctggaggacggcccagctgggctcagtgacacgcctggtgtcactctcggacgtgacctgacggagcggtttttccttctagtctggtaggacggcccttcagatcggggacagcctgaacaccgaaaaagcgacactgattgtcgtccacacagatgggagcatcgtggagaccaccgggctgaaaggcccggcagctcccctcaccccaggtacagcggtgcctgcaccccaggcctcgggcaaaacacgtttcagaatagctagaatttatttcagggatttatttacttgtttctttttgtggtaaatttggaatatcatctattaatagattttaagtaaaagcattggaattttcctgaccaagaagtttttccgccgttgaaggaggtggcgctgccggggaggtggtgtctgagatgagagtgtactatgcttcccggtgtccggcctctcaccttcaaacactttctctgcccaaggtcctcagtctcctccaacccctctggctcccggccaagaaaaaggtggaactaaatacaactgggacccttctgtgtacgacagtgagctgcccgtacggtgccggaacatcagcggcactctgtacaagaacaggctcggctcaggtgaggactgccacttcagactccaaagttgtattcccctttgtaacccccctagcataaattgggggctgagaaagatgaaaatcatggcacctagaactagttaagaagacagggctgggcgcggtggctgatgcctgtaataccagcactttgggaagccgaggcgggtggatcagaggtcaggagatcgagactatcctggctaacacgatgaaaacccgtctctactaaaaatacaaaaaattagtggagcgtggtggcaggcgcctgtagtcccatagtcccagctactcgggaggctgaggcaggagaatggcgtgaacccaggaggcagagcttgcagtgagctgagatcacgccactgcactccatcctgggcgacagagcgagactccgtctcaacaacaacgacaacaaaaaaacaagacaaaaggtgcaggtgacacccagttcctgtgaactgagctgaggcctgggagaggcacgggacagggctgcgcccaggaaccatctgggggtgaaaagccatcgtgacccacgggacaggagacaagcgagaagaagcaggagggaggcagggctgggacgtgttcctcaagttgccaggttagcttgggacttgtagatgaaggctctggaagtgggtaccagaggtgctcagtgtgggacctggttgagcttgcactgcctgtggacagcgggtggagagatcacgtagggggtcagaggcacaggctgcaaaggcagacccgtggtggacctgtcagggccaagtatgtgggtgggtgagatcacatgagccgctggggcgctggtgctggtggaggggttgaggaggcgccaggaggtaggcaatggcagaggtgacgttcccacctgccatcatcatgactgctgcccttccttgcaggcggccggggacggtgcatcaagcagggggagaactggtacagtcccaccgagtttgaggccatggcaggaagagccagcagtaaggactggaaaagaagcattcgctacgcgggccgacccttgcagtgcctcatccaggtatcgtccgtgacctcacctgtgctcagcacacagttcagacgtggggccctctgaggcggcccagccagagggagggcacagaccacggggtcagacaaatggggtttgcagcctccacctgctgtctgtgtggccttgggcgagtgatttaccctctcatgtttcagtttccgggtctttcacgtggggatgacgatgatcgtgaccctgtgaggattgttgggagaagtgcatgaggtcacagcgcctggcacagaatagctgcagaaagggggcgtgtcaaatacacaaaaaatgaaaacagtagaagttaagataatcgcttctgtttgaatgcgtgtgaccctttcaaagtcacctaacttctcgtcagtctactaagaaaagaggacttctaattcctattccagtttagctccttgggtgttgttaaggaagcaattcctgtagagacttttgcaaatcttgaaaggaaagaggtaggtcctgccaccaataatggcattgtgaaaaggagaaggctctggaaattactgtttttgtggttttttttttttttttttgagacagagtctcaccctgttgcccaggctggagtgcagtggcttgatcttggctcacagcaacctccacctcccaggctcagaggattgtcccacctcagcctcctgagtagctgggattacaggtgcccgccaccacacctggcttttttttttttttttttaattttcagtagagatggggtttcaccatgttggccaggctggtcttgaagtcctgacctcaggtgatctgcctgcctcggcctcccaaagtgctgggattacaggtgtgagccacaatacccggcctattttttttgtattttttaatagggacagggtttcaccacgctggccaggctagtctcgaactcccgacctcaagtgagccacctgcctcgcctctcaaagtgctgggattacaggcgtgagccacaatacccggcctaatttttgtattttaatggagaccaaccatgttggtcaggttggtcttgaacttctgaccttaagtgagccacccgcctcggcctcccaaagtgctgggattacatgtgtgagccaccacacctggcctgggcattacctgatttctcacaattttttttttttttgaggcaaaggcctccctctgttgcccaggctggagtgcagtggtgtgatctcagctcactgtaacctctgcctcccgggttcaagcgatcctcctgcctgagcctcccaggtagctgggactatgggcatgcgccaccatgcccagctaatttttgtatttttagcagacacgaggtttcaccatgttggccaggctggtctccagctcctgagctcaggtggtctgcctgcgtcggcctctcaaagtcctgggattacaggcatgagccaccatgcccggccctgattttgcagaatttttatctttatgaggttgggcacggtggcttacgcttgtaatcccagcacttcgggaggccgaggcgggcagattgcttgaggccaggagttcgagaccagcctggtcaacatggcaaaacctgtctctactaaaaatacaaaaattagctgggtgtggtggtgcaaacctataatcccagcttcttgggaggccgaggcatgagaattgcttgcgccggggaggcagaggttgcactgagccgagaacgtgccactgcactccagcctgggcaacccaacaagactctgtctcaaaaaaaaaaaaaaaaaaaagaatttttatatttatgaatggtaggtaagtggtaaaagtggttgaaatcttctattattgaatgattgacatttaggggctgacttgctaatgcatggtggttcttttcacatctcaggatgggatcttaaaccctcacgctgcctcttgcacctgtgctgcctgctgcgacgacatgaccttagtaagtggccagcgtgtctggaacaggatgacttggtggggctgggggcggctgagtgggtcccacagcccttggcctctcggctgtttccctcctgccctctgccttggagagagacactgtcctcacttctcctgggttgctctgttccctcctccctgatacgtcacagtgaatcctgatgtctcgatggggaacacgtggttggcccccaagatgttgctcaaagaacatttgtggaaaccttaaataatgaaaagcggttataatgtcaccgccttaactctaaaactaaacatacacgcttttccttgtatgcatgccattttatattcctcattttgtaacatgtcagaaaaatgctactgtaaacttattcatgtgtagagcttttaacgcctttttgacgtatttccttattctaaattcttaactgcttcacaaagacccaaaataatttttctttctttttttttttctgagacgaagtctcattctgtcgcccacactggggtgcagtggcgcggtctcggctcactgcaacctccgcctcctggattcaagcacttctcctgcctcagcttcccgcgtagctgggattacaggcatgtgccacaatgcccagctaatttttgtatttttagtagagatggggttttgccatgttggtcaggctggtctcaaactcctgaccacatgtgatccgcccgcctcagcctcccaaagtgttgagattacaggcgtgagccactgcacctcaaaaaaaaaaaaaaagagcatggagagacctaccgtgttcttggggtgaaacactaaacatcctagaattgtgtagttgatatatagatttcatgtgattctagtggaaaaaacaattttgtgaacgtaaaataattttgaagttgattgggaaaagccagtcggtgagactcttagagacgctgcaggagtaaaggagccgggaggagacgtcggtcccattggcagttgagcctgcaggtagatcatttgcaggggctccaacactgaagtacttagatgtcagtctaggaaatcatgtacagggtttgtacgtggaagatactaaagaaaatgctgaagagagagaccagggaagattgaaatacgtcaaaagacgtcctgcgcccgtggattagaagactcagtaaagatgcgactttttcccaagttgattcgtaggtttaacacaatgactatcaaaatcccagcaggattctttttagatgcagacaagctgattctaaaatttgcatagaaaggtaaaggaaataaaaaagccaaaacagttttgaaacaaaaaagccaaaacagttttgaaataaaagtttaaaatgggtggaatcacattgcggggtcttaagacttacgggctcgtgacagtaatcaagatagtgtggcactggcagagggagagaccccacgatctgggtcagactagagtgtcatagtagactccagcaaatggccttggagtgacaggacgttcatcagcagagacaaaggatgacctaaacttcacacttggtacaaaaatgaattcaaaatgggtcatcgatctaaagtgaaaggtgaaactataacatttttaggagaaaacacattggaaaatcttcctgacctggagttagaactaggatttcttggattggacttcatcaaattttagaacttttggcttccgcttggggagtggtggtgtgatgagctcagtggaccaactctccagagaaataactagtgaaaattgtgaaaaaataaccccttaaggtctccagaaattgtcctaggggagtacagcaaataaacatccaagaaaatgtagtaagtcttggaaagggcagtgaggattgtgacgtttgagctacgaccagctccttccctccctttctgcccccagctccctatggtggaggctccattgtgggtggttgtgaccaagaaaacggttcccactccttgcagttcccggtcaagggatatggtatctcactgggaggggcaggccaccagcatttctcaaccccttcagctctaagttgcagtaaattcctgggaagtgtgactgaaaatctcttcagtcatccccactcagagggcagaggctttacccaggcatgggaggccaagcatacggagccccaatttccatcaacccacattgcccatagggtggggtgtccatgcagtgagaggctgctgccccccacacagaacccggctaatgcaacagaattccctctgatagactcaggcactgttcctgcctctaggtctatagtaggggctcagacattcagcccaaaagagagagaggccgtaagaacagagagctccaaagcccctcccaaaggaactgacttgatttgaaacagtatggggatgttcaagcctaaaagtgccctggaaaagaatggacattttgatggtaagcagttaagaggaggccagcagttccattagagcaagaaactaaactgtaggtcagcaggtttaccagagaggcgaggaaagccacagcgaagaacccatctgggaaaccgaccttcaagatcgaacctctcagtaaagaagccctaatttaattggctcagacagtggagcagtgtgtgccccagggcattgttgaaagtaatggagcaggcagctggcagttagttgattctgacacttgactacaccaacagcttaacagagatcaggaagagcgacagccaaaactcccaccaccaaaggtgattgcaccccacccagggccgagccctcagaggagcagcagccgaggccgccccaggagaacaggctcagtaagatagtccagctccgtacctgagtaataaacaagctgacagcagcaaggatcccagagaaaggagaactgctttccactgttgctacaatgtatcacctgcggtgtctgattcttaacaaaagatgataagacatgcaaggagccttggaccatacacaggaagaaagcaggcaacagaaattgcctggagaggtccggatgttggggttaacaggaaaaagctttaaaatggctatcctcagtatgttcagaggactgaaggaaaccacagctagagattgcatggaaggtctgaagacactgtctcctcactggagaatgtcaatgaagagatataaattatttaaaaaaaaaagtcggccgggcgtggtggctcacgcctgtaatcctagcactttgggaggccgaggtgggcagatcacgaggtcaggagaacgagaccatcctggctaccatggtgaaaccccgtctctactaaaaatacaaaacactagccaggcttggtggcgggcgcctgtagtcccagctactcgggaggttgaggcaggagaatggcatgaacccgggaggcagagcttgcagtgagcccagattgtgccactgcactccagcctgggcaacagagcgagactctgtctcaaaaaaaaaaaaaaaaagaaagaaagaaaattagccgggtgtggtgacacatgcctgtaatcccagctactcaggagactaacgcagaatcacttgaacctgggaggcggaggttgcagtaagccaagatggcgccactgcactccagcgtgggcagctagagtgaaactccgtctcaaaaaagaaaaagaggtgggatctttaggggcgcttaccatcttaatgtggtctcaccatgtgactcacacaccccgcggtgcccccacttaaggaggagttgcaagcgcagcatagcttttgcacacatgaaggtggtggcctctctcctttctcccccagagtggcccagtcaggctttttgtgccttacaaaaggcgcaagaaggagaatgaactgcccacaactcccgtgaagaaggactcccccaagaacatcacattgcttccagccaccgcggctaccacctgtgagtttgagaaaacacagctctagtttactgaggggacctgagtgcattgccttctctcgtcaccactcccacggccactgcgggattctcacttctaaagcacattgcgtggccagagggattccaacgccatcacactcctttgcagtgcgtcccccgggtgggaaggggtgtcccagtgcccagctcggtcttgcttccctgggacccggacactgttggccttgtcctgggctgtttcctagtatgagtgagcatggctgagtgcccagcacacgctcaggggacgtttcctgacaagggcgtccttggtgagggattctcagtgcgctggacgagggctgcggagagctctgtgggtctttctctgtggccgggctggagggcggcgtcaggatcccggctcgctgcagcctcggcctcccaggctcaggcactgctctcacctcagcctcccaagtagctgggaccacaggcacgtgccaccatgcccagctaatgtttttatttttttgtacagacaggatttaaatggggagaggtagcaataggagaaaatgtctttgtaataggcttttgttaactaagtctgggtttttgcatttatagagtaaggtctttctaaaacaccctgtcagctccttcctgaggccctgggtggtgggtgcaggaagagtcccacagcagcagagtctcaagatctgtcgccaggatttttttttgagctggagaggcagccttgctgtgggacacagggcagccttgctgtgggacacggctgctttttaccttcagcttggattaaagattttttcttaattcgaaccacgaagtacttaaaaatcactgaaagttttattttatgtttgttttctggctgggcagcacatttccatggttcacagtttaaacagcgaacaattggtagtggcaagttgccatcctggccatcctggttttctcctgtgaggtcttctccaaggtctgggatttcccccgtgtccttcacatgggagggtacagttaccactgcccgcccttcagcccaggcccccacaaggattggcgcccgtgggtggcacgggacctgtgtgccgtgggcgccactgcctggccgcgtgaaatgtgcttctgcctttccagtcaccgtgaccccctcgggacagatcacgacctcgggggcactgacctttgaccgagcgtccacggtagaggccactgctgtcatatcagagagtccggcccagggcgacgtcttcgcaggggccacaggtgagctgctccagtgcctgcctgacgcgtcctcagcatatccctgtctgtgacatcacatccccgacgccacattgggctgcataggctgctgggtgcctcgagaggggccttgaaccaggcgtttgttggtggggacagcgtgtgagccacgtcaggtgggcggtgcagtgtggatggggttggcgtgtggcagtgggttacttgtgacagatgccagaactggcaaagctgaaaatactctctgtctgccggctcctgcttttgactgcagttgtgcaacagaaatgcagcctagctggttgtgtgctggagaatattctagaagccacactgaggaaaatagagttagaactgatttttttttttttttgaggtggagtctcgctccatcccccaggctggagggcagtggcatgatctcggctcattgcaagctccgcctcccgggttcacaccgttctcctgcctcagcctcccaagtagctgggactacagcgcctgccaccatgcccggctaatttttttttggtatttttagtagagacagcgtttcaccatgttagccaggatggtctctatctcctgacctcgtgatgcgcccatcttggcctcccaaagtgctgggattacaggcgtgagccaccgcgcccggcctgatttttataatctattttatttcacctgatatagccccaatcctattatgtcaacgattcaggatcaccacatttcaggggctcagtagccacgtgtggccataagctactatgtgtactgaatggcgcagccatacagcgtgatatttagagtctgctgtgcggacaaccatcccgagcctccctgtcctttttctccccaacagtccaagaggccagcgtgcagcccccatgcagggccagccaccctgagcctcactaccccggctatcaggacagctgccagatcgcaccgtttccagaagctgcgttgccaacgtcacatcccaaaataggtaggtttgaaagaattcacacatgtacaggttattgtcctcagaattgcttccaatgaaagaattcctaagtgaaatgggattcattttggtttggtttgttgtttttgttgatgcattagatcagtggctggtaaagtgtggcccactgcctatgtttgtaaataaagttttactgacacacagccacgtccattcatgtgtgtgctgtggaagttgcttttggtacagcagcagggcacgcccctagaaaccagttggcctgtgaagcctgaagttctttctggtgagtttgctgttgtcctcttgagggtagacactccccagtggcaggtcttggtctctccagagctggcatagacattcggtatctggtgaaagaaagaaaaaccaaggcctaaatgtggcctaaatctttaaaatgacgatacactgtaaatgcattctaactttgatttttcgtttaactgcacttctatttttttgagactgagtctcgctctattgcccaggctggggtgcagtggcgcaatcttggctcactgcaacctctgcctggttcaagtgattctcctgcctcagcctcccaggtagctgggattacagatctcgaactcctgacctcaagtgatccatccgcctcagcctcccaaagtgctgggattacaggtgtgagccaccacatgcagccaagatttctgtataattatacgttttttgtttttttttttgagacagagtgtcactctgtcgcccaggctggagtgcagtggtgcgatctcggctcactgcaacctctgcctgccaggtttaagcaattctcctgcctcagcctcctgagtagctgggactacaggtgcacgccaccatgcccagctaatttttttttgttattgtatttttagtagagatggggtttcaccatgctggtcaggctggtctcaaactcctgacctcatgatccacctgccttggcctcccaaagtgctgggattacaggcgtgagccatcgtgcccagccatcattatacttttttaaagggtgcatatgatcaatacatgattgattgaaccctcccctgctggtggcaaatgcatgttttccatttttcactgtcacagacagcgcaagaaacttgttcatgaaaaacttaccttttcattttcatttgcttgtttcattattctctcttttgcctatctaaactctttccatctttaaagcttacctcagggctgggcgtggtggctcatcctttttttgttttttttttgagatggagtcttgatctgttgcccaggctggagtgtagacttcaggcacgcgccaccatgcccggctaatttttgtatttttagtagagatggggtttcaccgtgttggccaggatggtcttgatctcttgaccttgtgatctgcctgctttggcctcccaaagtgcttggattacaggcgtgtggcttacctgtttaatcccagcactttaggaggccgaggccaggagtttgagaccggcctgggcaacataaggagaccccatctctattaactggaaaaaaaaaaaaagtgtggggtgggtgttggtgaagtatttataccaagaaatcagcaaatgcttgaaatcagagctttttctccaggagggctggggttcgcatcgaccgcttgcccctggtacaaggtgtgcatgtggctcctggatctctgtccccaggtgcccttggtgggcagaagtcagaaatgttctcatgtgcacgtgtgcgtgtttgtgctccaaatctgtgtgtgttgaaaaccatgagtttgccccagtgtctctagttccagtgcagaacctcagggtttgtgctagttcctttgtaactttcttctccaattgtaagaaaccccgctgggcgtggtggctcacgccggtaatcccagcgctttgggaggccgaggcgggtggatcacctgaggtcaggagtccgagaccagcctgaccaacgtggagaaaccccatctctactaaaaatacaaaattagccaggcctggtggcagatgcctgtaatcccagctactcgggaggctgaggcaggcgaatcacttgaacccgggagggcagtgagccaagatgatgccaccgccctccagcctgggcgacacagcgagactctgatttagccacttccctcccctggtcattgtccacggcgctgattctgcgaacatttcagggtccagcagccgcattcagatgagttgtacaacatggagctgggtgggtggagcaggaagggatgggacatcctcctgcctgtgttgcctgctggggggatgtcaggctgagtgctcggggatgtcaggtgctggggggatgtcgggtgctggggggatgtcgggtgctgggggtgtcgggtgctggggggatgtcaggctgcgtgctgggggatgtcaggtgctggggggatgtcaggtgctgggggtatcgggtgctgggggatgtcaggctgagtgctgggggatgtcaggtgcttggggatgtcagatgctggggggatgtcaggtgctgggggtgtcgggtgctgggggatgtcagatgctggggggtgtcaggtgctgggggggatgtcgggtgctggggggtgtcggatgctgggggttgtcgggtgctggggggtgtcgggtgctggggggtgtcgggtgccggggggtgccaggtgccccgggggatgtcgggtgccgggggatgtcaggctgcgtgctgggggatgtcaggtgctggggggtgtcaggtgctggggggatgtcaggcagtgatttgttgtttgctggtcagttttttacccgacttcccaacattgcgtgagagttttcttttcttttcttttttgagatggagtctcactctgtcacccaggcttgagtccactggcaccatctcggctcaccacaacttctgcctcccaggttcaaatgattctcatgcctcagcctcccaggtagctgggattatagacgcttccacgcctagctaatttttgtattttttggtagaaatggggtttcaccatgttgaccaggctagcctcgaactcctgacctcaagggatctgcccgcctcggcctcccaaagtgctgggattacaggtgtgagccactgtgcctggcctcttttctttttgagacagggtctcattaagtcaccaaggccgaaggacggtggcgcagtcatggctcactgtagcctcgaccacctgggctcaaaccatcctcccgcctcagcttcctgagtagctgggatcacaggtgaatgtcaccatgcccatctagttctttgtttttgatttctgttttgtagaggcaaggtcctgctatgttgcccaggctggtcttgaactcctgagctcaagtgatcctcccacctcagtctcccaaagtgcagggattacaggcatgagccactgcaccgggtgatgagaatttttatttattttttatttttaaattttatttgtttatttttttgagatggagtctcactctgttgcccaggctggagtgcagtggtgccatctctgttcactgcaagctctgcctcccggcttcacacctttctcctgcctcagcctcccgaggtagctgggactacaggcgtctaccaccacgtccagctaattttttgtattttttttagccaattttttgtatttttttgtatttttttaaacacagtgaaacgcggggtttcactgttagccaggatggtctcgatctcctgacctcatgatccgcctgccttggcctcccaaagtgctgggattacaggcgtgagccaccgcgcccggctgagaatttttaacggaggccattttgaagctaggagatgtattaatttcttggtttgttttgctttccaaatgctctagtgttgacatccctgcctgcgctggcggtcccacccccgactcccaccaaagcggcacctcccgcgttggtcaatgggctggagctgtcagagccgcggagctggctgtacctagaagagatggtcaactccttgctcaacacagcgcagcagctgaagacgctgtttgagcaagccaagcatgccagcacctaccgagaagctgccacaaaccaggccaagatccacgctgacgcagagcggaaggaggtaaccttggaacaaatgggaagacacgacctgtgccgagtaaccccaggccaccctggtgcctgtgcccagctgcgcaagccccaccttggctcacaaggcccctgccccacctttctggaaaagggagctgtggagagtcatttacaaatgaagcttttcctaaagaaaagtgacagctattgttgttaaggtggttttggtttttgtaaataaggttgctttgtttcagaaagggaaacaattttgtgcgcatcggccgttgtgaatactcaccttttctaggcattattcatcctttgtcttcctgtagtgaaatgtgcttatattttatgaagtttggagaacatcatctattgagtctctgagtatcagcgactggcagggcgaatgctgagccccttcctgggagccgagctccgtccatctgctgtcacaaagccctcccagcttctggcacgttcttcagaaggcggctcctgtgcatggtgggaggctcacagggcgtagtgcccatgttttctgtagcttcctattactgcagcacaagcaaaaggtcacttaggccccttcggcctcttttcatatggagtctctacttcatatgaaccctttacttagattgaagactttgaggtaatataaaggttcaggtgggtgacatgaatagggtagatagaaattactagagccagagtaaactggagagagggtggaggtttctcagctacttctcatagcccaaacccagcagacaggtaccgtgtgtcacagggcacggggacgagaaggtgagagaggagggcgcctgtctgctcagcacagatggggagctctgaaggccacaggaaaggacagggatggattttgttgtagctgctttttcgggtacggtaacgtggactttggtttgtaaacaaaagtcaaattcatatttttcccaccaaatctatgtaagaaacgttttcccccatttcttttctactttctatttttatttttatttgtggaacaggctgtcactctgtcgcccaggctagaatgcagtggcacaatctcggctcactgcaacctttgcctcccgggctccagcgattcttgtgcctcagcctcccaagtagctgggactacaggcacccaccaccacacctggctaattttctgtatttttggtagagacggggttttaccatgttgcccaggctgatctcacactcctgagctcaggtgatccacccgcctcagcctcttaaagtactgggattgcagatgtgagccaccatgcccagcttctactttttatagaagaactttttatttatgtatttattttattatcattatttttttttcagctgctgctttattttactttattttattttttgagacggagtctcgctccatcacccaggctggagtgcagtggcacgatcttggctaactgcaacctccacttcctgggatcaagcaattatcctgcctcagcctcccaagtagctgggactacaggcgcctgctgccatgcctggctaatttttgtatttttagtacagacagggtttcaccatgttggccaggctggtcttaaactcctgacctcaagtgatctacccgcctgagcgtcttaaagtgctgggattatacgtatttatttatttatctatttaaaaaaaatttttttttttgagacggagtcttgctgtgtcgctcaggctggagtgcaatggcacaatctcagctcactgcagcttcctcctcccgggttcaagtgattctcctgcctcagcctccggaatagctgggattacaggcatgtgctaccacacctggctgattttttgtatttttagtagagacggggtttcactatgttagccaggctggtcttgaacccctgacctcaggtgattcacccacctcagtctcccaaagtgctgggattacaggcatgagccaccttgcccggcctatttattttttaatttttaaatttttctgtcattcagtgcacatcaggtacttgttatagattctactagacaagcacataacgaacagtgattatcatcccaggccgtattcaatgttaggggtttgttacggattctactagacaagcacataatgaacggtgattctcaacccaggccgtattcaatgttaggggtttgttacggattctactagacaagcacataatgaacggtgattctcaacccaggtcgtattcgatgttaggggtttgttacggattctactagacaagcacataatgaacagtgattctcaacccaggtcgtattcgatgttaggggtttgttacggattctaccagacaagcacataacaaacagtgattctcatcccaggccgtattctatgttaggggtttgtgtagtttccccaggacctgtagtggtgattgtccagaagccttccataggaggaatgcatggtcattaggtatgccacagctccaaacaccagcaacaccactcaatgactattgaggtaatgacagtgacactgcagctccacatggctggggaggtctcaccatcatggcagatggcaaagcgggaggaaaggcatgtcttaatggtgacaggcgagcagaagagctttttagattcttaattttttaaatgactgatcaatatgtgattagtgttttttgtgtttctttttttttttttttttttttttaagaggtaaggtctcactctgttgcctaggctcatggctcattgtaggctcaaactcctggaaatacgggtgcatgccaccacgcttgcctaatttatttttttattttttattttttgtagagactgggtcttgccgtgttgcccaaggtggtctcaaactcctgggctcaagagatcctcctgcctcagcctcccaaagtgctgagattacaggcgtgagccactggacccagcattaattttctttcaaggaagaaaagtgtttctactcctgaagacaaagataattttaaaatactttttcactgggcacagtggatcacacttgtaatctcagtgctttgagaggctgaggtgggaggatcttttgagcccaggagtttgagaccagcttggacaacatggtgaaaccccgtctctacaaaaaaatataaaaattagctgggtgtggtggtgggcacctgtagtctcagctacttaggaggctgaggcaggagactcacttgaacccaggaggcagaggttgcagtgagctgagatcgggccactgcactccagtctggcgacagagcaagactctgtctcaaaaaacaaaaagtccaggcgcggtggctcacgcctgtaatcccagcactttgggaggccgaggcgggcggatcacgaggtcaggagatcgagaccatcctggctaacatggtgaaaccccatctctactaaaaatacaaaaaattagccgggcgtggtggcgggcgcctgtagtcccagctccttgggaggctgaggcaggagaatggcgtgaacccgggaggtggagattgcagtgagccgagatcgcgccactgcactccagcctgggtgacaaagtgagactctgtctcaaaaaaaaaaaaaaacattagccaggtgtggtgacatgccagtcaagaggctgaaacgtgaggattgcttgagcctaggaggttgatgttgcagtgagccgtgatcacaccactgtactccagcctgggcaacagagtgagacctcgtctcaaaaaaaaaaaaaaaaaacaaaaacaaaaagaaaaaagaaattaaaaaggaaaaaaataaagaaaaagatatatatatattttgagatggtcttgctgtgtcacccaggctagagtgcagtggtgtgatctcggctcactgcagcctccatctcccaggttcaagcgattcttgtgcctcagcttcccagatagctgggattacaggtatgtgcaaccacgcccagctattttttggtattttaggagagaagaggtttcgccatgttggcgaggctggtcttaaactccaggcctcaagtgatctacttgccttggcctcccaaagtgttgggattacaggtgtgagccaccgcacctggccaaaaaaatactttaaaaaaaaaaaaaaaaaagtatacttccaaacaaacagctacttaatgctgaaatttatagaggaaaagaaagtttaaaggcaaaaaaatctataaccctgcacccaaagataatgaccgtgaacacttactgtgtgtccttttggtcttttttggtaattgaggtaaactgtatgtacagcaaagtgcctcaatctccaccataaaatgtagtgagttttgatgaatgcatgaacctggtcatgagaccatttcaatccctgcagaagcaccactcatgtccccttccatcggtcccctgccccatggacagtcactgctctcatttttttttttttcttttctcttttgaggcagcatctcactctgtcactcaggctggagtgcagtggcatgatcttggttcactgcagccttgcgccaccatgcctggctaatttttgtattttttgtaaagatggggtttctttttttttttttttttttttttttgagacagtctcacactgtcacccaggctggagtacactgatgcaatctcggctcactgtagccttcgcctcccaggtttaagtgattctcctgcctcagcctcccgaatagctgggattacaggcacatgccaccatgcccagctaatttttgtgttttaagtagagacgaggtttcaccatgtttgtcaggctggtcttgaactcctgacctcaggtgatcctcctgcctcagcctcccaaagtgctgggattacaggcatgagccaccgcacctggcctcttttttttttgagacaagtttcgctcttgttgcccaggctggaatccaatggcacaatctcggctcgccataacctccacctcccaggttcaagagagtctcctgcttcagcctctcaagtagctgagattacaggcatgcgccaccacgcccagctaattttgtattttcagtagagacagggtttcaccatttaggtcaggctggtcttgagctcctgacctcaggtgatctgcccacctcggcctcccaaagtgctgagatgacaggtgtgaggtactgcacccagttgattttctagatttcctaccacaactgatttctaattcaactccaatatgcttagaaaatatactctgatttcagttcttttaaattgattacgatttatttcggccaggcatggtgactcacacctgtaatcccagcactttgggaggccaaggtcttgaggccaggagtttgagacaagcctggacattgtgagaccctgtctgtacaaaaaaaaaaaaaaaaaaaagggtcgggtgcagtggcttacgcctgtaatcccagcagtttgggaggccgaggcgggcagatcacaaggtcaggaggtcgagaccatcctggctaacacagtaaaaccccgtctctactaaaaatacaaaacattagccaggcatggtggcaggcacctatagtcccagctgctcaggaggctgaggcaggagaatggcatgaatccaggaggcagagcttgcagtgagccgagattgcaccactgcagtccagcctgggctacagagcgagactctgtctaaaaaaaaacaaaaaactttttttttaaagggtttcactttgtcacccaggctggagtacagaggtgtgacctcggctcactgcagcctcaagttcccaggctcaagcaatcctcttgcctcagccccccaagtagctgggactatgggcatgtgccaccatgcttggctaatttttgtatttttcatagagagagggtctcactgtgttgccaggctgatctcaaactcctgagctcaagccatccacccacctcagcttcccaaagtgctgggattacaggcatgaaccactgtgcccggccaaaatgtttccttcattagccggatcactggagcccaggggtagaggttgcagcgagctgtgatcacgccactgtgctccagcctgggcaacagaatgagaccctgtctcaaaaaaacaaaaagatgtgttttatgatcatgtatatacttttcgtggtgaatattgcatatacacttgaaaagagttttattcagtcattggttttcgttttctgtaatgtcattaggtcaaggtggttcatagtgtggtccaaatcttgtttttcttcaacctaaagatgtactttcagcttttcttttcatataggtctgttggccatgaattctctgtttttgtctgtaatgtccctctttcacctttatttttgagggacgtttttgagtgacatggaattctgggttgtcacttacatatatatatttttttgagacagagtctcgctcttgttttccaggctggagtgcagtggcacaatctccgctcactgcaacctccatttcccaggtttaagcaattctcctgcctcagcctcctgagtagctgggactatcggcgtgcgccaccacacccagctaatttttgtatttttggtagagacggggtttcgccatgttgctcaggctggtgttgaactcctgggctcaagtgatccacccgcctgggcctcccaaagtgctgggattacaggcatgagctaacacgccggcctatttatttatttattattttttgagacaaagtctcactctgtcaccaggctggagtgcagtgatgccatctcggttcgctgcaacctccgactccctggttcaagcgattctcctgcctcagcctcctgagtagctggaattacaggcacacaccaccatgcccagctaattttttgtatttttttattagagacagggttttgccatgttggccagaccggtcttgaacacctgaccgacctcaggtgattcacctgcctcggcctcccaaagtgctgggattataggcatgacctacctgggttgtcactttttatcattcaccagtttaaagatgtctttccatcatcttctggccagcctgcctacctgccttccttccttccttccttcctttcctcttttcctccttccctccttccctccctccctccctctctccttccttccttccttcctccctccctccctccatccctcccttccttccttcttttttctttcttttttgagacagggtcactgtctgtcaccgaggctaagaagcagtgttgtggtcacatctcaatgcagccttgagttcctgggctcaggtgatcttcccttagcctccagagtagctaggactaccggcactggccactactcccggccaatttttagctggggtttcaccatgatgcccaggctggccgcaaactccttggctcaagcgatcctcttacctcagccttctgagtagctgggactacacatgtgtaccaccatgcccagctatttttttgtttgttttgtatagatggggtttcactatgtttctcaggctggtcttgaactcctggactcaagcaacccaccttccttggcctcctaaagtactgggattaccagcatgaaccactgctcctggctataactatttctttttttcttttttttttttttttttttttttggagacagagtcttgctctccaggctagagtgcagtgacacgatctcagctcactgcaagctctacctcccaggttcaagcgatctcttgcctcagccttccaagtagatgggactacaagtgtgcaccaccacacctggctaatactttgttgttttgttttgttttgagacggagtcttgctctgtcgcccagggttggagtgcagtggcacgatctcagctcactgcaacctctgcctcccgggttcaagtgattctcctgcctcagcctcccgagtagctgggactacaggtgcatgccaccactcctggctaattttctgtatttttggtagagaggaggtttcaccatgttagccaggatgttcacaatctcctaacctcgtgatctgcccgcctgggattacaggtgtgagccaccgtgcccagcctcaggatctgcttcttttggctactttttcccttcatcatggatcctgttatcccttcttcacacgtccagtacttcctgattgtgtgttggaattttagtttatatactgtttatatggtagagtttatatggtagagactctgaattttgttggattctgttgtcttcccctgaagagtgttgggctttgttctcgcaggctgaattcttatggatcaccctgaagaggatcagtgttgatgctgttagggcaggtctgtctggctttttcttctgcctgacacatccttagtcttggatctgcgaagctgtggttttctggatgttcctgggaagtccgtggtgtttttaagcctctaacttgtgaaggttcaaactccagactttcaggtggtgagcagcagccgcagtctctgctcagtgttctcggtcttcagccgtccatttctgctgagtcttccccacatgctgtgtcatcagctcagggtcaaacaaggacgtggggagcgtttatgtgctggatgggagtgtcctctctctgtgcttgctcctttctagggtttctcccctcattttccagccactttgtcagctctggccagggtgactgcagcctgctaccacggtgtggccgcccatgtctggtggcctggggctgcctccaggagaagccttcctggctccatctccctgctacgtcacctgtccctgctatgtcacctggctgcctctctcccctgctcatttggcagccagagtgtctgatgctgctgcgtcagctgggtccctgccctgaaaggctgggctttgaattttattagtaattttatgtatttctatgagagaaatgtggcatgaaatccctttatccttaaaatcccgtttggtagacagccaagccttttaaaacgttagaaagggcggcccctttctcagctggaagcagctgttgcagtgaacatcccgtgcatctgaaaatgtcaggagttagaagaaatgtcaggaagtgttagaagcgatgtgttccctttctctaaagctgtgtatcggacgtgtcattcataaagccattacttgaatagctgagccaggactcagaggctctgagtgtgacaccctgtcctcctcctctcagtgtgaatagctgagccaggacttagttagagtgaccgagtgtgacaccctgtcctcctcctctcagtgtgaatagctgagccaggacttacttagagtgaccgagtgtgacaccctgtccttctcctctcggtgtgaatagctgagccaggacttacttagagtgaccgagtgtgacaccctgtcctcctcctctcggtgtgaatagctgagccaggactcagagtgaccgagtgtgacgccctgtcctcctcctctcggtgtgaatagctgagccaggactcagagtgaccgagtgtgacgccctgtcctcctcctctcggtgtgaatagctgagccaggactcagagtgaccgagtgtgacgccctgtcctcctcctctcggtgtgaatagctgagccaggactcagagtgaccgagtgtgacgccctgtcctcctcctctcggtgtgaatagctgagccaggactcagagtgaccgagtgtgacgccctgtcctcctcctctcggtgtgaatagctgagccaggactcagagtgaccgagtgtgacgccctgtcctcctcctctcggtgtgaatagctgagccaggactcagagtgaccgagtgtgacgccctgtcctcctcctctcggtgtgaatagctgagccaggactcagagtgaccgagtgtgacgccctgtcctcctcctctcggtgtgaatagctgagccaggactcagagtgaccgagtgtgacgccctgtcctcctcctctcggtgtgaatagctgagccaggactcagagtgaccgagtgtgacgccctgtcctcctcctctcggtgtgaatagctgagccaggactcagagtgaccgagtgtgacgccctgtcctcctcctctcggtgtgaatagctggagtcaggacttagaggctccgaatgtgataccgtttctgtcttcctcctctcagtgccatggcttggggtggatactgcttcacactccttcagggtggcccagacacagtaggtttcattttcctttttttttttcttttctctggtggctacaaaagtgaactttttttcttttttttctttttctttttttcttgagacagagtttcgctcttgttgcccaggctggagtgcaatggcgtgatctcggctcaccgcaacctctgcctcctgggttcaagggattcttctgcctcagcctcctgagtagctgggaatacaggcatgtgccaccacgcctggctaatttttgtatttttagtagagatggggtttcttcatgttggtcaggctggtcttgaactcccagcctcacgtgatccgcccacctcagcctcccaaagagctgggattataggcgggagccatggcactcggccctattttgtccgttttcttgagacatcttaaatgaacatatagcttcaggaagccatggtagcagacaggaccacagtgctttccgtgatgtggccgtctcctagagtccagcagaccggaccttcgcaagaaaaactgctgaggagatggagaaggaaaggccaaaagcctggtattcactccagaggcagtcgctgaggagatggaggaagggtcaaaagcctgatattcacttcagaggcagtcgctgaggagttggaggaggaaaggccaaaagcctgatttatcagtccagaggcagtcgctgaggagatggaggaggaaaggccaaaagcttcgtattcattccacaggcagttgctgaggcgatttgaggaggaaaggccaaaagcctggtattcacaccagaggcagttgctgaggagatggaggaggaaaggccaaaagcctggtattgactccagaggcagtcttttgttgttgttgttgagtctcactctgtcacccaggctggagtgcagtggcagaatctcggctcactgcaacctccgcctcccgggtgcaagcgattgtcctgcttcagtctcccgagtggctggaattacaggcacgcgccaccacgtctggctaatttttgtatttttagttgagatggagtttcgccgttattagccaggctggttttgaactcctgcgttcaggtgatccaccctccttggcctcccaaagtgctgggattacagacgtaagccaccatgctcaactaggttttgtgttttttatagagacagcatcttgttttgttgccgaggctggtcctgaacacgtggtctcaagatattcgcccagtcagcctcccagagtgctgggactctaggcgtgagcccctgcttctggcccccaggccagtagtaaaaagccaaatatcatccctttcagagcatcaggacagcggttgtgctcagggaggctgggaatgggcatcgtgccctctgggggtgcggcagggtcagttggctggaggatattcatggtgctgctgccccctgctgccgtgctgagggctgacatggtgaacagtcatgggcacttgcagacgtggttgtgcccagtgctgtgtgcatgcagccgttccagcaaaggtggtggtcacttggaccattgtggtgccatcatggtacagcacccaggcaggagcaaggccgttgtgttctggtgagatgatggttctgaattagatgtggagatttctttgagatcagctccacaggtatcttacgagggctcgggggtgaggctcagaagtcctacaaggaggggcctcaacctgtgtcccttcacctgcagcaacagcaacgcggagcaacctccaggagcctggggggcgcctgggctgggcgggagtcggaggtcggcgaggggaggaaggtggtcgcatgttggcgtcctcctgccctgtaggaagtactgaatggttccccacaacagtaggatgaaaatgagtttctgttccctgatcccacgccactgcagaatgggaggaaggctttatgccggggtgtccaatcttttctcttccctgggccacactgcaagaagaggaattgggccacacattaaaaatctcataatttttttttgttttatgagacggaatcttgctctgttgcccaggctggagtgcagtggcgcgatctcagctcaccacacacaacctctgcctcccgggatcaagcgattctcttgcttcagcctctcgagtagctgggattacaggtgcgcactactgcgcccagctagtttttgtattttgccatgttggccaggctggtcttgaactcctgacctcaggtgatccgcccacctcggcctctcaaagtgttgggattataggcatgagccaccgcgcccggcccataatgttttaagaaagtttacgaatgtgtgttgggcctcatgcaaagccatcctgggctgcatgcagcccgcgggctgtgggttggacaagcttgctttgtgccattaaattgttatttgtaattagtgctggaaagtcagggtttgagaggcagacactgctgtctctgaatggaaaggtccacgtgtgggaatgaggaagccttgctcatgagcaccctgacagagcacccatgcctccagcagtgggagggcaggcgtgacgctgccgattccacattgtatctggaatgtttgttttggagatggagtttcgctcttgttgcccaggctggagtgcagtggtgcgatctcagctcactgcaacctgtgcctcccaggttcaagcgattcttctgcctcagcctcccgagtagctggggttacaggcgcttgccaccacgcctggctaatttttgtatttttagtagacgcggtatttcaccatgttggccaggctggtgttgaacccctgacctccggtgatccacctgtctcggccttccaaagtgctgggattacaggcatgagcctcggtgcctggccttttatctggaatttaaaaaaaaaaaaaatcaaatgtagcccagctgaagctattaaggggattgttgccagctttaaccatgggaaatctgcattcgtgtgtatgtaatgagctctgcagagattcaacaaggcagaaaagcagatgcccttggctgtcaagggcacagtgtccagtggaagccagccgagtggctgcagggtcttggactcactgccctggccccggcttgttgttggccatgctgccctgagcgcaaaccccattcctctagcctgtccccgtttctagtagctcgctctcaggctttctccagtctccctaacttccttttaaagtgttaaatatagtacagcacagaagggtatgaaagggagaagaatacgtaagttggacagtaacaatgtccttgactcctaggaagctcagaaataggtctgtgctgtgcctggatggtgcctccgtgcctggggatctggaagggtggagacagaccccagagcagccgcttccctgcgggggcctctcccaacaccgtaaggccgcgggtgcctcaagcagcgccgagaggggcttgtgtttcagtgacatttccttgaagtccaggtatggggtttctgtaaatgaaggcttttgcctgccttgttctccagtgtcagcctaacactcacgtgagccaaataggcccggccagacccaagacagctcagtcacctgttccgcatcaaacatcagattccagagccggactggaccaacgtcctgccgtggcccagtgagcgagggttgctggcgtctttgggatactcgggagcagcccgccatccccgtgtccccagggaactcttcagagcaccccccagcagcgtggaagcccccggaaatgcaggcttggagtcccccgagggagccaggggtgttgtggtgggaggggcggccaggtgcccgggacggggtgaggcggcgccggcggggcagcctgggaaaagcacagaggtggctttgcagtcccacttcagggggaccctgcctgacctgggatgaggtgtgtgggctttctggggcaggggcggggacaggttgtaaatctgaatttgtctgatgcttcctcagagatctgtatcatggtcatttcatagaaacggcaaactctgtcccagctcaaaaagatgctattagactaatcctttgatctctttacgtgtgcggctcagctttcagataaacctgcttgatgttttgagggttttctcttatttccgttgcttcctcgagggagagtaatccagtctaatttgcatttctcttacttttaagctgagctgctgcgccctcacgggacacagtcatggggagccctctgccccatggtgggcattggtgaagccacagtggtcccgggggcagacctcaagggtgcacagcagcagccccttgggccctgcctgcccaagccccacctggccccacctgccctgtgttggggactttgtatttcagcctccatgcagggtgacgctgggactccccagcttccggttcacggcttcagggtccagcaggttctcctgaagccccatctaccgctggcttcctgctcactctcccctctcccgctctgtctctccagaggaggccgggcctgtggaattaggcggctgcttcacctgaactcactgcagtgccgggaaaggagcctctggaactagacccaggagcggatctgcaaaggctactcagggttctcccagcggctctgaaccccgaggccaactcgccctccaatcacctggcccctgaagcaggcggaggcccctgtgcacagtgggcctgtggccccatttggttcaggagtgatggtgacacggagttggctccatcgaggctcctggcagcattacatcctctaagaataagtcataaagaaagcactccttgtaagatacacgatccaccaggctgcctccaaccacagcctcatctccatccggggtgtgtctaggttttcttttttattattattttttatcatttgagacatgttctccctctgtcacccaggctggagtgcactggtgtgacctcagctcactgcaacctccacctcccaggctcaagcaatcctcccacctcagcctctctggtagctaagaggtgcatgccaccatgcccagctaattttttttttttttttttttgtagagacagggttttgccatgtcacctaggctggccttaaactcttgggctcaagcgatgctcccgcctcggcctcccaaagtgctgggattacaggtgtagccaccatgcctggccagtatctaggttttcaagttagacttagttttatttgcagaaagaataatgaatacattattaacttattctttgatagttagaaattaataggcattttatatgtgatcttatggtcttactcttggttggctgtttctgaaggagtggctttgttatctgtaatttgtctaatttaaaaatcaattataatgaaaccagcatatgtgattcacaaggcttttttccacctggaccagagtacaccagctattgcattgccaaaagtaggtgtgttcctgttgtgtgatgtgcagatggggggcccctgcagcagggaaggcaggccaggaaaccccttcgcagtctctgctgaggggctggacccgctgcttgggcgggactccccgcagggtgctctgctgcagtctcctcctctgcccgcctgcggcccagagaactctgaatgctaatggcaatgccagctgcttggcagcatgagcttcttggggcgcctgggcaggcctgggcacttctgccctttgtgccatccgcagtcctgtgatttcctgacagtttcctgaaagcgcagaatgggacttgtcgatgtccttggctgcggaaacgcggtgtcttgtcctaaccttctgcaacgcacacacacctcttccgcagtaatgaatggttttttgtttttgtttttgagacagagtctagctctgtcacccaggctggagtgcagtggcgcgttctcggctcactgcaagctccacctcctgggttcatgccattctcctgccttagcctcgcgagtagccgggagtacaggcacccgccaacacgcctggctaatttttttgtatttttagtagagacagggtttcaccgtgttagccaggatggtctcgatctcctgacctcgtgatccgcctgcctcagcctcccaaagtgctgggattacaggcgtgagccaccgtgcccggctaatgaatggttattttaaaaaataaacgtatttcgggataattttaggtttacagaaaagttgcaaagtgagcgcagagggtcccttctgccactccgcagcctcccctctgtaacttcaaagcccacagggcatggctgttgtagctgagaaaccgtcgctgggtgtccctgtgaactccggactttgaatttcactatcaatgtcctgtttctgctctaggaccttgtccccgctgccacctgtgggagacagcctcccgtgcaccatttgcccagcaccctcaggcctgtgacggtctctcagtctttccttgtcttccatgccctgcagttctgagagggcctggccaggcagtttgtccaggtgccccgatccaggcttgtcttgtgctttctcgtgggggtggacgacaggtttcagggaggggtgctgccgcctgtctcaccccactgtggcgtccctgacatccaagtgacattacagacagctctgaccttcctcaccagagtcaggtgtctgtaggtgtctccttggtgacaggactgcttctccctttgcacatttagtcaggcagcaagtccacggccgtgggggggcttctcctagacgggaggatctggaatagcttggacttgtatttatttatttgatcatttgtttgtatccggatgggctcattttatatgtgttttaaactctgagctagaaggcaacactactttcttgtgaagcacaccatctgtccttggccctagggagctcctgccgtcggctcctgggtcccctgatgcacccctttcaacagacttttcattttggggtacgtcctgacttcctggcactgcagggtgctccagcctcctcttgcattccctgccctggcccgggaatcagccccttctccaaggagccccgggtccttttattggcaagtcttaagagagtgaggcctgggtgccaggcagggagccccaggtccttttattgggaagtcttagagagtgaggcctgggtgccaggtgggtgccaggtgggtccggtgctgctgggatgttgtcacgtggaggccctcagctgcagagcagggacgagggtgtcacctgttcagctgcagagcagggatgagggtgtcacctgtgtgtatgaacatctccgcagccacttctgtatctgtgaagagaacatgagttcatgctactgcctctgactctaattcagaccccaaagctccttctaaccttcctagaacgttatttttcagtttaaaaaaaaaaaaaagttttgcaaagggcataccgcgaaaggcccaagtggttgaaagtcccagctgaggctgaagaggcgcctgcgaggcaacaggacaggcttcccgttcagttcaggggtgctgtcctccaggaactatgctggggggcaagtacaggacgtcctggtgtgtggtgcacagggactgctggacacggagacccgtgcccttctcagcgtgggggccgctccccgggacagtgaccacgctcccgccagcctcccaccccacctgacctctgtctgtgaggggctggaccagggtcctgcctggcccggccatccacagagcaacccagaatgttaataaagcctgcagaagctgtgttctccttcgagaagcttctctgtggttacagactttttaagaaatattttgtcggctgggcttggtggctcatgcctgtaatcccagcattttgggaggccaaggcaggcggatcacctgaggtcaggagtttccgagaccagcctggccaacagggcaaaaccccgtctctactaaaaatacaaaaattagccaggcatggtggcaagcgcctataatcccagctacttgagaggctaaggtggaagcattgctcgaatctggaaggtggtggttgcaatgagctgagatcgtgccactgcactccaggctgggcgacagagcgagactccatctcaaaaaaaaaaaaaaagtttgtcatttaaagtagaggcacaggccaggcgcggtggctcatgcctgtaatcccagcactttggggggccgactcaggtggatcatttgaggtcaggagctcgagaccagcctgaccaatatggtgaaaccccatctgtactaaaaatacaaaaaaattagccaggcgtggtggtccgtgcctgtagtcccagctgtggggaggctgaggcacaagaatcacttaaacccaggaggtggaggttgcagtgagccgagattgcgccactacactccagcctgggcgacagagtgagactccatctcaaaaaaataataataataataaataaataaagtagaggcagggggcaacctaaattagcaccaaaattcctcctaatgctcctgttttctgaagtgagtgactgaatgtcggagctctgaatgtcttacaactggaaaaatgttaaagatcacgtttgcgaaggagggaggcaagcatcagaacagaacctcggagcaggtctgcacgcgtgcaggggccgtggggccgcgctggagtcgtttcctgtgctgctctgtgctgctcacagacgctgccactcacccactggccacggcccctcccgcagctgcggatgatctgggcgcatagcgggcgtgcaggtcgcggcgccaaggcctctcctaggcccagtggtcttctccgtctcagagagcattgacggcggagctcacaactgtcaagcaccttagtcatgccgcaaacattaatcattgacagcatgttgacctatgcgctgattaaaaagaaaagctccaataatgtaattccaggagaaagtacacaaacctctggtggcatcttttcaatccaccacagaaaccagctcaggtggggccgtgggggtgttggctggggcaccgccgcagcagtttgggacacatgcctgccacggtgcgcccaggctgatgcccacagccctgctcaggagtgttgggagcggtggactcctgagtttgattttctgtgctggcctggctggagtgaagctccttggagtttggagaaagatttccatgctgatttccctttgtttttgtttgtttgtttgtttgtttgttttggagacagtcttgctctgtcgcccaggctggagtgcaatggtacaatctcggggtttcaccgtgttagccaggatggtctcgatctcctaacttcgtgatccgcccacctcagcctcctaaagtgctgggattacaggcatgagccactgcatccggccctgatttccctttttttttgagatgggagtctcgctctgtcacccaggctggagtgcagtagtgcaatctcggttcactgcaacctccgcctcctgggtgcaagctattctcccacctcagcctcccaggtagctgggattacaggtggccaccaccacacccagctaatttttgtatttttagtagagactgggtttcgcaacgttgcctgtgctgaactcctgacctcaggtgatccacccgcctcggctgcccaaagtcctgggattacaggtatgagccgctgctcccggcccatactggtcttccagtgaatgaatgtagggggcaaactgcactgaggccaggaaagagctgattctggaggtgacaagaacgttctgagcagcactggggcagaggcgcagtcaagagtccaatgggagctgggcgcagtggctcacgcctgtaatcccagcactttgggaggccgaggcaggtggatcacgaggtcagaggttcaagaccagcctgaccaacatggtgaaaccctgtctctactaaaaatacacaaattagctgggcgtggtgtcaggcacctatcatcccagactcaggaggctgagacaggagaattgcttgaacccaggaggcggaagttgcagtgagctgagatcgcaccacggcactccagcctgggcgacagagtgagactccatctcaaaaaaaaaaaaaaaaaaaaagggggtccaatggggggaacttggggcctcctgcctgcacctgcctctgtccccggtgtctcaggggctctccacggccacgtcactgactggcctgttgtgtccttcttgcagcagtcctgcgttaactgcggccgggaggctatgagcgagtgcaccggctgccacaaggtcaactactgctccaccttctgccaacgcaaggtaggtctcacctacaccaggctcagtgcccccgcctcctccctcgctacgaagacccctgggtggccctccctccccttgtgctcctggtgccacacctgactcccctccctgtccctccctctgggaatccggggctcctgcctggctccgtgaagaccctgcagaaggctcacatgtgacatggccaggtagtgctctcatgtgaggccccacagttggtggccggaaaccctgagggctgctggtcagtgcttcccagccctccacacccctgcacagccacgcaagagagactgtccacagttccattattgagccctccacacccctgcagagccacgtgagagagactgtccacagttcctctattattcagccctccacacccctgcagagccacgcaagagagactgtccacagttcctctattattgagccctccacacccctgcagagccacgcgagagagactgtccacagttcttctattattgagccctccacacccctgcagagccacgcgagagagactgtccacagttcctctattattgagccctccacacccctgcagagccacgcgagagagagcgtccacagttcctctattattgagccctccacacccctgcagagccacgcgagagagagactgtccacagttcctctattattgagccctccacacccctgcagagccacgcgagagacagcgtccacagttcctctattattcagccctccgctccacagaaattcaagagaaattttgtaggctacaaacggtagttcaggattgtataactttgtctaccataatcagagtactcgggagcatttagtcactctttttttttttttttttttttttttttgagacagagtctcattctgtcacccaggctggagtgcagtggtgcgatcttggctcgctgcaacctctgcctcccgggttcaagcgattctcctgcctcagcctcccgagtagctgggattacaggcatgcgccaccatacctggctaatttttgtatttttagtagagacggggtctcaccacgttgggcaagctggtctcgaactcctgacctcaggtgatccacccaccttggcctcccaaagtgctgggatttagaggtgtgagctactgttcccagcagctttactaatctttttgatggtttttttttctcatatttatgagagatgctggtctatattttgtcctgtgatgtctttgtttcatgttggtgtcagagcaacactggcctttcagatcaattgggaagtgtgcccttctgccctccttctctattttctttttgagacagttttgctctgtagcccaggctggagtgcagtggcaagatctcggctcactgcaacctctgcctcccgggttcaagtgattctcctacctcagcctcccgagtagctgggattacaggcatgcacctccacccccggctaatttttatgtttttagtagagacagggtttcaccatgttgcccaggctggtctcaaacttctggcctcaagtgatctgcctgcctcggcctcccaaattgctgggattgcaagtgtgagccacggcacccagcctgtgtttcatctttattcagttcgaatattttatgcagttgaaaatatttgccgtgtgatttttttctgtgacctatgagttatttggaagtgtgtgctggattcaggagtagatctaaaaaagaagtatgctaatttcaaatatttctggatttcttaaatgtacctttataattaatttctactttaattacattgtggttcaagaacatacttagtgtttttcagtacctttaaatttattgagatttgtgttagggcctagcgtatggtcttatcatggagagtgttgcttgtatattctgctctgttgggtggagtattagatatcagttaggttggttgatagtattgttcaactctttcatattctcactgattttctctatttgttctaccccttatttagagtgaagtgttgaactctccagctattactgttgaattatctggtttttgtttttgtttttgagacggagtctcgctctgtcgcccaggctggagtgtagtggcgccatctcagctcaccgcaagctccgcctcccaggttcacgccattctcctgcctcagcctcccgagtagctgggaccacaggcacccgccaccacgcccggctgattttttgtatttttagtagagacagggtttcactgtgttagccaggatggtctcgatctcctgaccttgtgatctgccctcctcagtctcctttcaaagtgctgggattacaggcgtgagccaccgtgcccagctgaattatctgtttttatctgccattatgcctgtttttgcttcatttattttgggtctctgttgttaggtgcatgtatgtttagtttataattatcattcctgatgaattagctcttttatcattataaaacatccttctttgtctcaataagttttttattttttatttaattttttttttttttttcttacagagatggagtcttactatgttgaccagcctggtctccatctcctggcttcgggcgatcctcccatgtcagcctcccaaagtgctaggattataggcatgaggcactacaccagccaacagaagtttttatattaaaatttactttttctagctgggcacagtggctcacgcctgtcatcccagcactttgggaggctgaggcaggtggatcaccggtcgggagtttgagaccagcttggctaacatggtaagaccccatctctactaaaaacacaaaaattagccaggcgtggtggcgcgtgcctgtaatcccagctactagcggggctgaggcaggaggattgcttgaacctgggaggcggaggttgcagtaagccaagatcactccactgcactctagtctgggcaacagagcgagactccatctcaaaaaaaaaaaattaccttttctgatagtagcatagacactccacctgtcttatggtgaatgtttgcatcttttacttttgagacagagtctcactctgtcacccagactggagcgcagtggcatgatcttgactcacggcagcctctacagatacacgccccacgcccagctaattctttgtatttttagttgagacggggtttcgccattttgcccaggctggtctcgaccccttggactcaagtgttccacccccgcttggcctcccaaagtgctgggatgacaggcatgagtcactgcgcccagcctgcatctttttaaaaaaaacctttttggctgggtgcagtggcccacaccagtcatcccaacactttgggaggccaagaggggaggatctcttgagcccagggccagcctggccaacaaagcgagaccctgtttctattttttaattaaataaacatataaataaacaaacatcttgttacttctaattttgtgtccttggctcttaagcattcccttagagacagaatgtggttggatcttaggttttaatctagtctgatagtctctgccttttttttttttttttttttttttttgagacggactgtcactctgtcccccaggctggaatgcagtggctccatctccactcactgcaacctccatctcctgggttcaagtgattctcatagctcagcctcccaagtagctgggattacaggctcctgccaccacactcagctaatttttgtatttttaatagagacgggtttcaccatgttggccaggctggtctcaaactcctgacctcaagagattcacccgcctcagcctcccaaagtggtgggattacaggtgtgaaccaccacactagtctctgccttttgattggagtgtttaatctacttttttgttttgtttttgtttttgtttttgtttttgttttttagacaatctcactctgtcgccaggctggagtgcaatggcacgatctcagcccactgcaacctcaacgtcccgggttcaagtgatttcccttcctcagcctcctgagtagctgggattataggcatgagccaccacgtccaactaatttttgtgtttttagtagagatggggtttctccgtgttggcaaggctggtctcgaactcctgacctcaggtgatccactcgcctcagcctcccaaagttctaagattacaggtgtgagccaccgcactggaactcggcctgttttgttttttgaattgagacagagtatcactttgttgcccaggctggagtgcactggcgtaatctcggctcactgcagcctccacctcctgggtttaagggattctcgtgcctcattctcccgagtaactgggactgcaggagtgtgccatcagacccggctaatttttgtacttttagtagacacagggtttcaccatgttggtcaggctggtcttgagctcctgacctcaagtgatccgcccgcctcggcctcccaaactgctgggattataggtgtgagccaccacacccagctgttttgtttttttttttaagtggggtctctctctgtcacccaggccagagtgcagtggcacaatctcagctcagtgcaacctccgcttcccgggttcaagcaatactcctccttcagcctcccaagtaactgggattacaggcacccgccaccatgcccgtttttgttgttgttgttgtgtgtgtgtgtgatggagtctcgcacggttgcccaggctagagtgcagtggcgcaatctcggctcactgcagcctctgcctcccgggttcaagcgattctcctgcctcagcctcccaagtagttgggattacaggcatgcaccaccatgccaggctaatttttgtatttttcgtagagagagggttttgccatgttggccaggctggtcttgaactcctgggctcaagtaaccctcccaccttggcctcccaaagtgctgggattataggcatgagccactgcgcaaaacctaatctcatgtttaatgtaattatcaatgtgagtggatttgtgtttatatttgcagtttatgtttcatgttttgctcctctgttctttcactgccttcttttctgttaaatgtgtattttctagttgtgttttctagtgtaccacttcaattcttttgttgaacatttttaaacagtatctttaaagttgttattttcttactgctataggtattacaatatacattttaatttatctcagtttcagtaggaggatagaatttcctcaagcagggaaagtgtactgcagaggctgagtgtatacattcctggcaaacactatttgggccccaatataagcacttactgagctcctttcacctacagaacgaacacatcccgttcttttaaaagctgccttccagccggacctccagcccaggacaccctgtcctcaagcctccctcagatcctgttctttaaaaagctgccttcagctgggcacggtggctcacgcctgtaatcccagcactttgggaggccgaggcgggcggatcacgaggtcaggagatcgagaccatcctggctaacatggtgaaaccccgtctctactaaaaatacaaaaaaattagcttggcgtggtggtgggcgcctgtagtcccaggtactcgggaggctgaggcaggagaatggcatgaacccgggaggcggagcttgcagtgagccgagatcgtgccacagcactccagcctgggagacaaagggagactccgtctcaaaaaaaaaaaaaaaaggcagtgataattttaaaaattaattgtagaggacttggtatgtacacaaaagtatacacgagtttatgcatgttatgaagccccaacaggaatcccctgctcccagcaccgcctgggtcaagtccacccacctgctcccagcaccgcctgggtcaagtccacccacctgctcccagcaccgcctgggtcaagtccacccacctgctcccagcaccgcctgggtcaagtccacccacctgctcccagcaccgcctgggtcaagtccacccacctgctcccagcaccgcctgggtcaagtccacccacctgctcccagcaccgcctgggtcaagtccacccacctgctcccagcaccgcctgggtcaagtccacccacctgctcccagcactgcctggattgagtcacctacgtgctgtggtggcaacacttttcttttaatccttaactttggaaaatgtgagacgtgcacatgagttggatcgcccaggagaggcccgtcgccctcacctgtatcagctgctttagcgcctgccctcctggcttgtccccctctctctttgggctgagggctgagcattttaaagcaagccccacgcatcattattttcatttgtgaggcctggatcactgtaagtcagatttggattgtgttttaattggatttttagtcactgtttttatttcattacttatttttggtttttatttgttcgtttgtttttggttttgtttctgtttttgagacagggtctggctctgtcacccaggctggagtgcagcggcgcgatcttggctcactgcaacctccacttcccaggttcaagcgattctcctgcctcagcctccctagtagctggggattacaggcacccgccaccacgtccggctaatttttgtatttttagcagagacggggtttcaccatgttgttcaggctggtcttgaactcctgacctcatgatctgcctgccttggcctcccaaagtgctgagattactggcatgagccaccgtacccagcctattttaggttttctatagacagggtctcgctttgtcacccaggctgcagtccagtggtgccatcacggctcactacagccttgatctcctggctcaagtgatcctcctgcctctgtctcccaagtagcttggaccacaggcatgagccaccacacccagctaattttaaaacatttttttttttttatagagatagggttttgctatgttgctcaggctggtctccaacccctgacctcaagtgacctcaacctcccgaagtcattgtttttacagtctgtgatgttggcttttctcatttatttgtatcaggcactttcattgttagcttcttgtgaatttaaccatttttttccgtttttcaaaaactgaaacgctaacttctaattctggcttttcagataatgatttttttttcaaaagtgttttagcattatactgtaagaagcatcacattgatgtttaagatggaaaaatttgctttaaaaaagaactgagtagttctgattttaaaagtcaaccctgggcctttgcctctttgctggaagaacctgatggaagcttctgtagctcagagtcaacactgatgtgcgccctctctccctccatctgcacaggccccagggagtggctcaaacctgtagaccagagaaggaagcatctagaactcctgggggccttgtccgccgcccacatcctctcacggggggcagctcccatgaggggtgcaggcccctcaccccacacagagtctcggcaggaaccggaacccttcctggttgccccagagtggaggcccgggaggggcgggcggtgggtctgcacccgatgctgcagtttgctgatgtatgtgctttcatgctatgtagatttatagtctattaccaggtaattttaattttttttttttttttttttttgagacgtagtctcactctgtcgcccgggctggagtgccgtggcacaatcttggcttactgcaacctctgcctcccaggttcaagtgattcttgtgcctcagcctcccaagtagctgagattgcaggtgcgcatgaccacaggcggctagtttttgtatttttagtagagatggggttttgccatgttgggcaggctggtctcgagctcctggcctcaggtgatctgcccacctcggcctcccaacatgatgggattacagccgtgaaccactgcgcccggcctaattttgctcttttattataatcagctggaattctgctctctagggaataactctgtcaccatttggaagcatttatttctgctctgtgtgtcatatacgtacctatcacgcccccgtgcacggagctgcctctgtctgacgaggccgtctcagcttcagcacctggcgcttcctctagagctctgctccattccgaggtgctcgacgtagcagggaggcagagcctggttctgtgtgctgacctcacaggagctgtggcttctcccaggcaccatcccccacctcctttctctgcagccacgggctggttccagtttgctttttcatctttgccattaaaaacagaactggggcggggcgcagtggctcacacctgtcatcccagcactttgggaggccgaggcgggcagatcccctgaggtcaggagttcgagaccagcctgaccaacatggtgaaaccctgtctctactaaaaatgcaaaacattagccaggtgtggtggcgtgcacctgtaatcccagctgctagggaggctgaggcaagagaattgcttgaacccaggaggcagaggtcgtggtgagccgagattgcgcgttacactccagcctgggaaacaagagcgaaactctgtccgaaaaacaacaaaaaaacccccacagaacttgatcgtaatttacatatgtaatatttacatatttaaatgtttttctgcatgtgtgatattttttgtttacatccctaacacaaaacaactggtttggagagtcttaccctggtttgttgtttgactttttttttttttttttttgatatggagttgttctgtcacccgggctggagtgcagtggcaccatctcggctccctgcaacctctgcctcccagggctgagcagttctcctgcctcagcttcccgagtagctgggattagaggtgcctgccaccatgcccagctaatttttgtatttttagtagatacggggtttcaccatgttggccaggctggtctcgaactcctgacctcaggggatccaccctcctgggcctcccaaagtgttgggattacaggcgtgagccaccgtgccctgcctgttgtttgccttttgatccaattcctcaaaccaagagagtgtggggaaggctgtattggagcagagcccaccagagtttgggcgcacgggggctggggagggcattctcagcacctccaggtgaggttacagagggctgcaccctctggggtctgccttggggaccctgcccagaccctgctccacccactgaccctgctgacatgggtgtgtcctcccttccaggactggaaggatcaccagcacatatgcggccagtcagcagctgtcaccgtccaggcagacgaagtccacgtggctgaaagcgtgatggagaaggtgaccgtgtgaggctccatcggccgccctgggagctggggcccctcgcactcctgtgaggcttttgcaggtcgaaggcccccctgaggactctggggggacgttgagaagaggggtgtgggaaggtaaagaaacttgctggacaagtcattaacacactttaagcgaatggtgccctgggaagcgcactccccctgcccgggccccctgcccgctcgcggacagattttttatccctgggatcatgagcgtccggtcttgcccacagggcctgtgctgcgacgcacatacatacgtgttgtgtctgtcaataaagtgtaaataaggtc

SEQ ID NO: 15542 - DNA, 43704 bp, Homo sapiens
tctgtacaagaacaggctcggctcaggtgaggactgccacttcagactccaaagttgtattcccctttgtaacccccctagcataaattgggggctgagaaagatgaaaatcatggcacctagaactagttaagaagacagggctgggcgcggtggctgatgcctgtaataccagcactttgggaagccgaggcgggtggatcagaggtcaggagatcgagactatcctggctaacacgatgaaaacccgtctctactaaaaatacaaaaaattagtggagcgtggtggcaggcgcctgtagtcccatagtcccagctactcgggaggctgaggcaggagaatggcgtgaacccaggaggcagagcttgcagtgagctgagatcacgccactgcactccatcctgggcgacagagcgagactccgtctcaacaacaacgacaacaaaaaaacaagacaaaaggtgcaggtgacacccagttcctgtgaactgagctgaggcctgggagaggcacgggacagggctgcgcccaggaaccatctgggggtgaaaagccatcgtgacccacgggacaggagacaagcgagaagaagcaggagggaggcagggctgggacgtgttcctcaagttgccaggttagcttgggacttgtagatgaaggctctggaagtgggtaccagaggtgctcagtgtgggacctggttgagcttgcactgcctgtggacagcgggtggagagatcacgtagggggtcagaggcacaggctgcaaaggcagacccgtggtggacctgtcagggccaagtatgtgggtgggtgagatcacatgagccgctggggcgctggtgctggtggaggggttgaggaggcgccaggaggtaggcaatggcagaggtgacgttcccacctgccatcatcatgactgctgcccttccttgcaggcggccggggacggtgcatcaagcagggggagaactggtacagtcccaccgagtttgaggccatggcaggaagagccagcagtaaggactggaaaagaagcattcgctacgcgggccgacccttgcagtgcctcatccaggtatcgtccgtgacctcacctgtgctcagcacacagttcagacgtggggccctctgaggcggcccagccagagggagggcacagaccacggggtcagacaaatggggtttgcagcctccacctgctgtctgtgtggccttgggcgagtgatttaccctctcatgtttcagtttccgggtctttcacgtggggatgacgatgatcgtgaccctgtgaggattgttgggagaagtgcatgaggtcacagcgcctggcacagaatagctgcagaaagggggcgtgtcaaatacacaaaaaatgaaaacagtagaagttaagataatcgcttctgtttgaatgcgtgtgaccctttcaaagtcacctaacttctcgtcagtctactaagaaaagaggacttctaattcctattccagtttagctccttgggtgttgttaaggaagcaattcctgtagagacttttgcaaatcttgaaaggaaagaggtaggtcctgccaccaataatggcattgtgaaaaggagaaggctctggaaattactgtttttgtggttttttttttttttttttgagacagagtctcaccctgttgcccaggctggagtgcagtggcttgatcttggctcacagcaacctccacctcccaggctcagaggattgtcccacctcagcctcctgagtagctgggattacaggtgcccgccaccacacctggcttttttttttttttttttaattttcagtagagatggggtttcaccatgttggccaggctggtcttgaagtcctgacctcaggtgatctgcctgcctcggcctcccaaagtgctgggattacaggtgtgagccacaatacccggcctattttttttgtattttttaatagggacagggtttcaccacgctggccaggctagtctcgaactcccgacctcaagtgagccacctgcctcgcctctcaaagtgctgggattacaggcgtgagccacaatacccggcctaatttttgtattttaatggagaccaaccatgttggtcaggttggtcttgaacttctgaccttaagtgagccacccgcctcggcctcccaaagtgctgggattacatgtgtgagccaccacacctggcctgggcattacctgatttctcacaattttttttttttttgaggcaaaggcctccctctgttgcccaggctggagtgcagtggtgtgatctcagctcactgtaacctctgcctcccgggttcaagcgatcctcctgcctgagcctcccaggtagctgggactatgggcatgcgccaccatgcccagctaatttttgtatttttagcagacacgaggtttcaccatgttggccaggctggtctccagctcctgagctcaggtggtctgcctgcgtcggcctctcaaagtcctgggattacaggcatgagccaccatgcccggccctgattttgcagaatttttatctttatgaggttgggcacggtggcttacgcttgtaatcccagcacttcgggaggccgaggcgggcagattgcttgaggccaggagttcgagaccagcctggtcaacatggcaaaacctgtctctactaaaaatacaaaaattagctgggtgtggtggtgcaaacctataatcccagcttcttgggaggccgaggcatgagaattgcttgcgccggggaggcagaggttgcactgagccgagaacgtgccactgcactccagcctgggcaacccaacaagactctgtctcaaaaaaaaaaaaaaaaaaaagaatttttatatttatgaatggtaggtaagtggtaaaagtggttgaaatcttctattattgaatgattgacatttaggggctgacttgctaatgcatggtggttcttttcacatctcaggatgggatcttaaaccctcacgctgcctcttgcacctgtgctgcctgctgcgacgacatgaccttagtaagtggccagcgtgtctggaacaggatgacttggtggggctgggggcggctgagtgggtcccacagcccttggcctctcggctgtttccctcctgccctctgccttggagagagacactgtcctcacttctcctgggttgctctgttccctcctccctgatacgtcacagtgaatcctgatgtctcgatggggaacacgtggttggcccccaagatgttgctcaaagaacatttgtggaaaccttaaataatgaaaagcggttataatgtcaccgccttaactctaaaactaaacatacacgcttttccttgtatgcatgccattttatattcctcattttgtaacatgtcagaaaaatgctactgtaaacttattcatgtgtagagcttttaacgcctttttgacgtatttccttattctaaattcttaactgcttcacaaagacccaaaataatttttctttctttttttttttctgagacgaagtctcattctgtcgcccacactggggtgcagtggcgcggtctcggctcactgcaacctccgcctcctggattcaagcacttctcctgcctcagcttcccgcgtagctgggattacaggcatgtgccacaatgcccagctaatttttgtatttttagtagagatggggttttgccatgttggtcaggctggtctcaaactcctgaccacatgtgatccgcccgcctcagcctcccaaagtgttgagattacaggcgtgagccactgcacctcaaaaaaaaaaaaaaagagcatggagagacctaccgtgttcttggggtgaaacactaaacatcctagaattgtgtagttgatatatagatttcatgtgattctagtggaaaaaacaattttgtgaacgtaaaataattttgaagttgattgggaaaagccagtcggtgagactcttagagacgctgcaggagtaaaggagccgggaggagacgtcggtcccattggcagttgagcctgcaggtagatcatttgcaggggctccaacactgaagtacttagatgtcagtctaggaaatcatgtacagggtttgtacgtggaagatactaaagaaaatgctgaagagagagaccagggaagattgaaatacgtcaaaagacgtcctgcgcccgtggattagaagactcagtaaagatgcgactttttcccaagttgattcgtaggtttaacacaatgactatcaaaatcccagcaggattctttttagatgcagacaagctgattctaaaatttgcatagaaaggtaaaggaaataaaaaagccaaaacagttttgaaacaaaaaagccaaaacagttttgaaataaaagtttaaaatgggtggaatcacattgcggggtcttaagacttacgggctcgtgacagtaatcaagatagtgtggcactggcagagggagagaccccacgatctgggtcagactagagtgtcatagtagactccagcaaatggccttggagtgacaggacgttcatcagcagagacaaaggatgacctaaacttcacacttggtacaaaaatgaattcaaaatgggtcatcgatctaaagtgaaaggtgaaactataacatttttaggagaaaacacattggaaaatcttcctgacctggagttagaactaggatttcttggattggacttcatcaaattttagaacttttggcttccgcttggggagtggtggtgtgatgagctcagtggaccaactctccagagaaataactagtgaaaattgtgaaaaaataaccccttaaggtctccagaaattgtcctaggggagtacagcaaataaacatccaagaaaatgtagtaagtcttggaaagggcagtgaggattgtgacgtttgagctacgaccagctccttccctccctttctgcccccagctccctatggtggaggctccattgtgggtggttgtgaccaagaaaacggttcccactccttgcagttcccggtcaagggatatggtatctcactgggaggggcaggccaccagcatttctcaaccccttcagctctaagttgcagtaaattcctgggaagtgtgactgaaaatctcttcagtcatccccactcagagggcagaggctttacccaggcatgggaggccaagcatacggagccccaatttccatcaacccacattgcccatagggtggggtgtccatgcagtgagaggctgctgccccccacacagaacccggctaatgcaacagaattccctctgatagactcaggcactgttcctgcctctaggtctatagtaggggctcagacattcagcccaaaagagagagaggccgtaagaacagagagctccaaagcccctcccaaaggaactgacttgatttgaaacagtatggggatgttcaagcctaaaagtgccctggaaaagaatggacattttgatggtaagcagttaagaggaggccagcagttccattagagcaagaaactaaactgtaggtcagcaggtttaccagagaggcgaggaaagccacagcgaagaacccatctgggaaaccgaccttcaagatcgaacctctcagtaaagaagccctaatttaattggctcagacagtggagcagtgtgtgccccagggcattgttgaaagtaatggagcaggcagctggcagttagttgattctgacacttgactacaccaacagcttaacagagatcaggaagagcgacagccaaaactcccaccaccaaaggtgattgcaccccacccagggccgagccctcagaggagcagcagccgaggccgccccaggagaacaggctcagtaagatagtccagctccgtacctgagtaataaacaagctgacagcagcaaggatcccagagaaaggagaactgctttccactgttgctacaatgtatcacctgcggtgtctgattcttaacaaaagatgataagacatgcaaggagccttggaccatacacaggaagaaagcaggcaacagaaattgcctggagaggtccggatgttggggttaacaggaaaaagctttaaaatggctatcctcagtatgttcagaggactgaaggaaaccacagctagagattgcatggaaggtctgaagacactgtctcctcactggagaatgtcaatgaagagatataaattatttaaaaaaaaaagtcggccgggcgtggtggctcacgcctgtaatcctagcactttgggaggccgaggtgggcagatcacgaggtcaggagaacgagaccatcctggctaccatggtgaaaccccgtctctactaaaaatacaaaacactagccaggcttggtggcgggcgcctgtagtcccagctactcgggaggttgaggcaggagaatggcatgaacccgggaggcagagcttgcagtgagcccagattgtgccactgcactccagcctgggcaacagagcgagactctgtctcaaaaaaaaaaaaaaaaagaaagaaagaaaattagccgggtgtggtgacacatgcctgtaatcccagctactcaggagactaacgcagaatcacttgaacctgggaggcggaggttgcagtaagccaagatggcgccactgcactccagcgtgggcagctagagtgaaactccgtctcaaaaaagaaaaagaggtgggatctttaggggcgcttaccatcttaatgtggtctcaccatgtgactcacacaccccgcggtgcccccacttaaggaggagttgcaagcgcagcatagcttttgcacacatgaaggtggtggcctctctcctttctcccccagagtggcccagtcaggctttttgtgccttacaaaaggcgcaagaaggagaatgaactgcccacaactcccgtgaagaaggactcccccaagaacatcacattgcttccagccaccgcggctaccacctgtgagtttgagaaaacacagctctagtttactgaggggacctgagtgcattgccttctctcgtcaccactcccacggccactgcgggattctcacttctaaagcacattgcgtggccagagggattccaacgccatcacactcctttgcagtgcgtcccccgggtgggaaggggtgtcccagtgcccagctcggtcttgcttccctgggacccggacactgttggccttgtcctgggctgtttcctagtatgagtgagcatggctgagtgcccagcacacgctcaggggacgtttcctgacaagggcgtccttggtgagggattctcagtgcgctggacgagggctgcggagagctctgtgggtctttctctgtggccgggctggagggcggcgtcaggatcccggctcgctgcagcctcggcctcccaggctcaggcactgctctcacctcagcctcccaagtagctgggaccacaggcacgtgccaccatgcccagctaatgtttttatttttttgtacagacaggatttaaatggggagaggtagcaataggagaaaatgtctttgtaataggcttttgttaactaagtctgggtttttgcatttatagagtaaggtctttctaaaacaccctgtcagctccttcctgaggccctgggtggtgggtgcaggaagagtcccacagcagcagagtctcaagatctgtcgccaggatttttttttgagctggagaggcagccttgctgtgggacacagggcagccttgctgtgggacacggctgctttttaccttcagcttggattaaagattttttcttaattcgaaccacgaagtacttaaaaatcactgaaagttttattttatgtttgttttctggctgggcagcacatttccatggttcacagtttaaacagcgaacaattggtagtggcaagttgccatcctggccatcctggttttctcctgtgaggtcttctccaaggtctgggatttcccccgtgtccttcacatgggagggtacagttaccactgcccgcccttcagcccaggcccccacaaggattggcgcccgtgggtggcacgggacctgtgtgccgtgggcgccactgcctggccgcgtgaaatgtgcttctgcctttccagtcaccgtgaccccctcgggacagatcacgacctcgggggcactgacctttgaccgagcgtccacggtagaggccactgctgtcatatcagagagtccggcccagggcgacgtcttcgcaggggccacaggtgagctgctccagtgcctgcctgacgcgtcctcagcatatccctgtctgtgacatcacatccccgacgccacattgggctgcataggctgctgggtgcctcgagaggggccttgaaccaggcgtttgttggtggggacagcgtgtgagccacgtcaggtgggcggtgcagtgtggatggggttggcgtgtggcagtgggttacttgtgacagatgccagaactggcaaagctgaaaatactctctgtctgccggctcctgcttttgactgcagttgtgcaacagaaatgcagcctagctggttgtgtgctggagaatattctagaagccacactgaggaaaatagagttagaactgatttttttttttttttgaggtggagtctcgctccatcccccaggctggagggcagtggcatgatctcggctcattgcaagctccgcctcccgggttcacaccgttctcctgcctcagcctcccaagtagctgggactacagcgcctgccaccatgcccggctaatttttttttggtatttttagtagagacagcgtttcaccatgttagccaggatggtctctatctcctgacctcgtgatgcgcccatcttggcctcccaaagtgctgggattacaggcgtgagccaccgcgcccggcctgatttttataatctattttatttcacctgatatagccccaatcctattatgtcaacgattcaggatcaccacatttcaggggctcagtagccacgtgtggccataagctactatgtgtactgaatggcgcagccatacagcgtgatatttagagtctgctgtgcggacaaccatcccgagcctccctgtcctttttctccccaacagtccaagaggccagcgtgcagcccccatgcagggccagccaccctgagcctcactaccccggctatcaggacagctgccagatcgcaccgtttccagaagctgcgttgccaacgtcacatcccaaaataggtaggtttgaaagaattcacacatgtacaggttattgtcctcagaattgcttccaatgaaagaattcctaagtgaaatgggattcattttggtttggtttgttgtttttgttgatgcattagatcagtggctggtaaagtgtggcccactgcctatgtttgtaaataaagttttactgacacacagccacgtccattcatgtgtgtgctgtggaagttgcttttggtacagcagcagggcacgcccctagaaaccagttggcctgtgaagcctgaagttctttctggtgagtttgctgttgtcctcttgagggtagacactccccagtggcaggtcttggtctctccagagctggcatagacattcggtatctggtgaaagaaagaaaaaccaaggcctaaatgtggcctaaatctttaaaatgacgatacactgtaaatgcattctaactttgatttttcgtttaactgcacttctatttttttgagactgagtctcgctctattgcccaggctggggtgcagtggcgcaatcttggctcactgcaacctctgcctggttcaagtgattctcctgcctcagcctcccaggtagctgggattacagatctcgaactcctgacctcaagtgatccatccgcctcagcctcccaaagtgctgggattacaggtgtgagccaccacatgcagccaagatttctgtataattatacgttttttgtttttttttttgagacagagtgtcactctgtcgcccaggctggagtgcagtggtgcgatctcggctcactgcaacctctgcctgccaggtttaagcaattctcctgcctcagcctcctgagtagctgggactacaggtgcacgccaccatgcccagctaatttttttttgttattgtatttttagtagagatggggtttcaccatgctggtcaggctggtctcaaactcctgacctcatgatccacctgccttggcctcccaaagtgctgggattacaggcgtgagccatcgtgcccagccatcattatacttttttaaagggtgcatatgatcaatacatgattgattgaaccctcccctgctggtggcaaatgcatgttttccatttttcactgtcacagacagcgcaagaaacttgttcatgaaaaacttaccttttcattttcatttgcttgtttcattattctctcttttgcctatctaaactctttccatctttaaagcttacctcagggctgggcgtggtggctcatcctttttttgttttttttttgagatggagtcttgatctgttgcccaggctggagtgtagacttcaggcacgcgccaccatgcccggctaatttttgtatttttagtagagatggggtttcaccgtgttggccaggatggtcttgatctcttgaccttgtgatctgcctgctttggcctcccaaagtgcttggattacaggcgtgtggcttacctgtttaatcccagcactttaggaggccgaggccaggagtttgagaccggcctgggcaacataaggagaccccatctctattaactggaaaaaaaaaaaaagtgtggggtgggtgttggtgaagtatttataccaagaaatcagcaaatgcttgaaatcagagctttttctccaggagggctggggttcgcatcgaccgcttgcccctggtacaaggtgtgcatgtggctcctggatctctgtccccaggtgcccttggtgggcagaagtcagaaatgttctcatgtgcacgtgtgcgtgtttgtgctccaaatctgtgtgtgttgaaaaccatgagtttgccccagtgtctctagttccagtgcagaacctcagggtttgtgctagttcctttgtaactttcttctccaattgtaagaaaccccgctgggcgtggtggctcacgccggtaatcccagcgctttgggaggccgaggcgggtggatcacctgaggtcaggagtccgagaccagcctgaccaacgtggagaaaccccatctctactaaaaatacaaaattagccaggcctggtggcagatgcctgtaatcccagctactcgggaggctgaggcaggcgaatcacttgaacccgggagggcagtgagccaagatgatgccaccgccctccagcctgggcgacacagcgagactctgatttagccacttccctcccctggtcattgtccacggcgctgattctgcgaacatttcagggtccagcagccgcattcagatgagttgtacaacatggagctgggtgggtggagcaggaagggatgggacatcctcctgcctgtgttgcctgctggggggatgtcaggctgagtgctcggggatgtcaggtgctggggggatgtcgggtgctggggggatgtcgggtgctgggggtgtcgggtgctggggggatgtcaggctgcgtgctgggggatgtcaggtgctggggggatgtcaggtgctgggggtatcgggtgctgggggatgtcaggctgagtgctgggggatgtcaggtgcttggggatgtcagatgctggggggatgtcaggtgctgggggtgtcgggtgctgggggatgtcagatgctggggggtgtcaggtgctgggggggatgtcgggtgctggggggtgtcggatgctgggggttgtcgggtgctggggggtgtcgggtgctggggggtgtcgggtgccggggggtgccaggtgccccgggggatgtcgggtgccgggggatgtcaggctgcgtgctgggggatgtcaggtgctggggggtgtcaggtgctggggggatgtcaggcagtgatttgttgtttgctggtcagttttttacccgacttcccaacattgcgtgagagttttcttttcttttcttttttgagatggagtctcactctgtcacccaggcttgagtccactggcaccatctcggctcaccacaacttctgcctcccaggttcaaatgattctcatgcctcagcctcccaggtagctgggattatagacgcttccacgcctagctaatttttgtattttttggtagaaatggggtttcaccatgttgaccaggctagcctcgaactcctgacctcaagggatctgcccgcctcggcctcccaaagtgctgggattacaggtgtgagccactgtgcctggcctcttttctttttgagacagggtctcattaagtcaccaaggccgaaggacggtggcgcagtcatggctcactgtagcctcgaccacctgggctcaaaccatcctcccgcctcagcttcctgagtagctgggatcacaggtgaatgtcaccatgcccatctagttctttgtttttgatttctgttttgtagaggcaaggtcctgctatgttgcccaggctggtcttgaactcctgagctcaagtgatcctcccacctcagtctcccaaagtgcagggattacaggcatgagccactgcaccgggtgatgagaatttttatttattttttatttttaaattttatttgtttatttttttgagatggagtctcactctgttgcccaggctggagtgcagtggtgccatctctgttcactgcaagctctgcctcccggcttcacacctttctcctgcctcagcctcccgaggtagctgggactacaggcgtctaccaccacgtccagctaattttttgtattttttttagccaattttttgtatttttttgtatttttttaaacacagtgaaacgcggggtttcactgttagccaggatggtctcgatctcctgacctcatgatccgcctgccttggcctcccaaagtgctgggattacaggcgtgagccaccgcgcccggctgagaatttttaacggaggccattttgaagctaggagatgtattaatttcttggtttgttttgctttccaaatgctctagtgttgacatccctgcctgcgctggcggtcccacccccgactcccaccaaagcggcacctcccgcgttggtcaatgggctggagctgtcagagccgcggagctggctgtacctagaagagatggtcaactccttgctcaacacagcgcagcagctgaagacgctgtttgagcaagccaagcatgccagcacctaccgagaagctgccacaaaccaggccaagatccacgctgacgcagagcggaaggaggtaaccttggaacaaatgggaagacacgacctgtgccgagtaaccccaggccaccctggtgcctgtgcccagctgcgcaagccccaccttggctcacaaggcccctgccccacctttctggaaaagggagctgtggagagtcatttacaaatgaagcttttcctaaagaaaagtgacagctattgttgttaaggtggttttggtttttgtaaataaggttgctttgtttcagaaagggaaacaattttgtgcgcatcggccgttgtgaatactcaccttttctaggcattattcatcctttgtcttcctgtagtgaaatgtgcttatattttatgaagtttggagaacatcatctattgagtctctgagtatcagcgactggcagggcgaatgctgagccccttcctgggagccgagctccgtccatctgctgtcacaaagccctcccagcttctggcacgttcttcagaaggcggctcctgtgcatggtgggaggctcacagggcgtagtgcccatgttttctgtagcttcctattactgcagcacaagcaaaaggtcacttaggccccttcggcctcttttcatatggagtctctacttcatatgaaccctttacttagattgaagactttgaggtaatataaaggttcaggtgggtgacatgaatagggtagatagaaattactagagccagagtaaactggagagagggtggaggtttctcagctacttctcatagcccaaacccagcagacaggtaccgtgtgtcacagggcacggggacgagaaggtgagagaggagggcgcctgtctgctcagcacagatggggagctctgaaggccacaggaaaggacagggatggattttgttgtagctgctttttcgggtacggtaacgtggactttggtttgtaaacaaaagtcaaattcatatttttcccaccaaatctatgtaagaaacgttttcccccatttcttttctactttctatttttatttttatttgtggaacaggctgtcactctgtcgcccaggctagaatgcagtggcacaatctcggctcactgcaacctttgcctcccgggctccagcgattcttgtgcctcagcctcccaagtagctgggactacaggcacccaccaccacacctggctaattttctgtatttttggtagagacggggttttaccatgttgcccaggctgatctcacactcctgagctcaggtgatccacccgcctcagcctcttaaagtactgggattgcagatgtgagccaccatgcccagcttctactttttatagaagaactttttatttatgtatttattttattatcattatttttttttcagctgctgctttattttactttattttattttttgagacggagtctcgctccatcacccaggctggagtgcagtggcacgatcttggctaactgcaacctccacttcctgggatcaagcaattatcctgcctcagcctcccaagtagctgggactacaggcgcctgctgccatgcctggctaatttttgtatttttagtacagacagggtttcaccatgttggccaggctggtcttaaactcctgacctcaagtgatctacccgcctgagcgtcttaaagtgctgggattatacgtatttatttatttatctatttaaaaaaaatttttttttttgagacggagtcttgctgtgtcgctcaggctggagtgcaatggcacaatctcagctcactgcagcttcctcctcccgggttcaagtgattctcctgcctcagcctccggaatagctgggattacaggcatgtgctaccacacctggctgattttttgtatttttagtagagacggggtttcactatgttagccaggctggtcttgaacccctgacctcaggtgattcacccacctcagtctcccaaagtgctgggattacaggcatgagccaccttgcccggcctatttattttttaatttttaaatttttctgtcattcagtgcacatcaggtacttgttatagattctactagacaagcacataacgaacagtgattatcatcccaggccgtattcaatgttaggggtttgttacggattctactagacaagcacataatgaacggtgattctcaacccaggccgtattcaatgttaggggtttgttacggattctactagacaagcacataatgaacggtgattctcaacccaggtcgtattcgatgttaggggtttgttacggattctactagacaagcacataatgaacagtgattctcaacccaggtcgtattcgatgttaggggtttgttacggattctaccagacaagcacataacaaacagtgattctcatcccaggccgtattctatgttaggggtttgtgtagtttccccaggacctgtagtggtgattgtccagaagccttccataggaggaatgcatggtcattaggtatgccacagctccaaacaccagcaacaccactcaatgactattgaggtaatgacagtgacactgcagctccacatggctggggaggtctcaccatcatggcagatggcaaagcgggaggaaaggcatgtcttaatggtgacaggcgagcagaagagctttttagattcttaattttttaaatgactgatcaatatgtgattagtgttttttgtgtttctttttttttttttttttttttttaagaggtaaggtctcactctgttgcctaggctcatggctcattgtaggctcaaactcctggaaatacgggtgcatgccaccacgcttgcctaatttatttttttattttttattttttgtagagactgggtcttgccgtgttgcccaaggtggtctcaaactcctgggctcaagagatcctcctgcctcagcctcccaaagtgctgagattacaggcgtgagccactggacccagcattaattttctttcaaggaagaaaagtgtttctactcctgaagacaaagataattttaaaatactttttcactgggcacagtggatcacacttgtaatctcagtgctttgagaggctgaggtgggaggatcttttgagcccaggagtttgagaccagcttggacaacatggtgaaaccccgtctctacaaaaaaatataaaaattagctgggtgtggtggtgggcacctgtagtctcagctacttaggaggctgaggcaggagactcacttgaacccaggaggcagaggttgcagtgagctgagatcgggccactgcactccagtctggcgacagagcaagactctgtctcaaaaaacaaaaagtccaggcgcggtggctcacgcctgtaatcccagcactttgggaggccgaggcgggcggatcacgaggtcaggagatcgagaccatcctggctaacatggtgaaaccccatctctactaaaaatacaaaaaattagccgggcgtggtggcgggcgcctgtagtcccagctccttgggaggctgaggcaggagaatggcgtgaacccgggaggtggagattgcagtgagccgagatcgcgccactgcactccagcctgggtgacaaagtgagactctgtctcaaaaaaaaaaaaaaacattagccaggtgtggtgacatgccagtcaagaggctgaaacgtgaggattgcttgagcctaggaggttgatgttgcagtgagccgtgatcacaccactgtactccagcctgggcaacagagtgagacctcgtctcaaaaaaaaaaaaaaaaaacaaaaacaaaaagaaaaaagaaattaaaaaggaaaaaaataaagaaaaagatatatatatattttgagatggtcttgctgtgtcacccaggctagagtgcagtggtgtgatctcggctcactgcagcctccatctcccaggttcaagcgattcttgtgcctcagcttcccagatagctgggattacaggtatgtgcaaccacgcccagctattttttggtattttaggagagaagaggtttcgccatgttggcgaggctggtcttaaactccaggcctcaagtgatctacttgccttggcctcccaaagtgttgggattacaggtgtgagccaccgcacctggccaaaaaaatactttaaaaaaaaaaaaaaaaaagtatacttccaaacaaacagctacttaatgctgaaatttatagaggaaaagaaagtttaaaggcaaaaaaatctataaccctgcacccaaagataatgaccgtgaacacttactgtgtgtccttttggtcttttttggtaattgaggtaaactgtatgtacagcaaagtgcctcaatctccaccataaaatgtagtgagttttgatgaatgcatgaacctggtcatgagaccatttcaatccctgcagaagcaccactcatgtccccttccatcggtcccctgccccatggacagtcactgctctcatttttttttttttcttttctcttttgaggcagcatctcactctgtcactcaggctggagtgcagtggcatgatcttggttcactgcagccttgcgccaccatgcctggctaatttttgtattttttgtaaagatggggtttctttttttttttttttttttttttttgagacagtctcacactgtcacccaggctggagtacactgatgcaatctcggctcactgtagccttcgcctcccaggtttaagtgattctcctgcctcagcctcccgaatagctgggattacaggcacatgccaccatgcccagctaatttttgtgttttaagtagagacgaggtttcaccatgtttgtcaggctggtcttgaactcctgacctcaggtgatcctcctgcctcagcctcccaaagtgctgggattacaggcatgagccaccgcacctggcctcttttttttttgagacaagtttcgctcttgttgcccaggctggaatccaatggcacaatctcggctcgccataacctccacctcccaggttcaagagagtctcctgcttcagcctctcaagtagctgagattacaggcatgcgccaccacgcccagctaattttgtattttcagtagagacagggtttcaccatttaggtcaggctggtcttgagctcctgacctcaggtgatctgcccacctcggcctcccaaagtgctgagatgacaggtgtgaggtactgcacccagttgattttctagatttcctaccacaactgatttctaattcaactccaatatgcttagaaaatatactctgatttcagttcttttaaattgattacgatttatttcggccaggcatggtgactcacacctgtaatcccagcactttgggaggccaaggtcttgaggccaggagtttgagacaagcctggacattgtgagaccctgtctgtacaaaaaaaaaaaaaaaaaaaagggtcgggtgcagtggcttacgcctgtaatcccagcagtttgggaggccgaggcgggcagatcacaaggtcaggaggtcgagaccatcctggctaacacagtaaaaccccgtctctactaaaaatacaaaacattagccaggcatggtggcaggcacctatagtcccagctgctcaggaggctgaggcaggagaatggcatgaatccaggaggcagagcttgcagtgagccgagattgcaccactgcagtccagcctgggctacagagcgagactctgtctaaaaaaaaacaaaaaactttttttttaaagggtttcactttgtcacccaggctggagtacagaggtgtgacctcggctcactgcagcctcaagttcccaggctcaagcaatcctcttgcctcagccccccaagtagctgggactatgggcatgtgccaccatgcttggctaatttttgtatttttcatagagagagggtctcactgtgttgccaggctgatctcaaactcctgagctcaagccatccacccacctcagcttcccaaagtgctgggattacaggcatgaaccactgtgcccggccaaaatgtttccttcattagccggatcactggagcccaggggtagaggttgcagcgagctgtgatcacgccactgtgctccagcctgggcaacagaatgagaccctgtctcaaaaaaacaaaaagatgtgttttatgatcatgtatatacttttcgtggtgaatattgcatatacacttgaaaagagttttattcagtcattggttttcgttttctgtaatgtcattaggtcaaggtggttcatagtgtggtccaaatcttgtttttcttcaacctaaagatgtactttcagcttttcttttcatataggtctgttggccatgaattctctgtttttgtctgtaatgtccctctttcacctttatttttgagggacgtttttgagtgacatggaattctgggttgtcacttacatatatatatttttttgagacagagtctcgctcttgttttccaggctggagtgcagtggcacaatctccgctcactgcaacctccatttcccaggtttaagcaattctcctgcctcagcctcctgagtagctgggactatcggcgtgcgccaccacacccagctaatttttgtatttttggtagagacggggtttcgccatgttgctcaggctggtgttgaactcctgggctcaagtgatccacccgcctgggcctcccaaagtgctgggattacaggcatgagctaacacgccggcctatttatttatttattattttttgagacaaagtctcactctgtcaccaggctggagtgcagtgatgccatctcggttcgctgcaacctccgactccctggttcaagcgattctcctgcctcagcctcctgagtagctggaattacaggcacacaccaccatgcccagctaattttttgtatttttttattagagacagggttttgccatgttggccagaccggtcttgaacacctgaccgacctcaggtgattcacctgcctcggcctcccaaagtgctgggattataggcatgacctacctgggttgtcactttttatcattcaccagtttaaagatgtctttccatcatcttctggccagcctgcctacctgccttccttccttccttccttcctttcctcttttcctccttccctccttccctccctccctccctctctccttccttccttccttcctccctccctccctccatccctcccttccttccttcttttttctttcttttttgagacagggtcactgtctgtcaccgaggctaagaagcagtgttgtggtcacatctcaatgcagccttgagttcctgggctcaggtgatcttcccttagcctccagagtagctaggactaccggcactggccactactcccggccaatttttagctggggtttcaccatgatgcccaggctggccgcaaactccttggctcaagcgatcctcttacctcagccttctgagtagctgggactacacatgtgtaccaccatgcccagctatttttttgtttgttttgtatagatggggtttcactatgtttctcaggctggtcttgaactcctggactcaagcaacccaccttccttggcctcctaaagtactgggattaccagcatgaaccactgctcctggctataactatttctttttttcttttttttttttttttttttttttggagacagagtcttgctctccaggctagagtgcagtgacacgatctcagctcactgcaagctctacctcccaggttcaagcgatctcttgcctcagccttccaagtagatgggactacaagtgtgcaccaccacacctggctaatactttgttgttttgttttgttttgagacggagtcttgctctgtcgcccagggttggagtgcagtggcacgatctcagctcactgcaacctctgcctcccgggttcaagtgattctcctgcctcagcctcccgagtagctgggactacaggtgcatgccaccactcctggctaattttctgtatttttggtagagaggaggtttcaccatgttagccaggatgttcacaatctcctaacctcgtgatctgcccgcctgggattacaggtgtgagccaccgtgcccagcctcaggatctgcttcttttggctactttttcccttcatcatggatcctgttatcccttcttcacacgtccagtacttcctgattgtgtgttggaattttagtttatatactgtttatatggtagagtttatatggtagagactctgaattttgttggattctgttgtcttcccctgaagagtgttgggctttgttctcgcaggctgaattcttatggatcaccctgaagaggatcagtgttgatgctgttagggcaggtctgtctggctttttcttctgcctgacacatccttagtcttggatctgcgaagctgtggttttctggatgttcctgggaagtccgtggtgtttttaagcctctaacttgtgaaggttcaaactccagactttcaggtggtgagcagcagccgcagtctctgctcagtgttctcggtcttcagccgtccatttctgctgagtcttccccacatgctgtgtcatcagctcagggtcaaacaaggacgtggggagcgtttatgtgctggatgggagtgtcctctctctgtgcttgctcctttctagggtttctcccctcattttccagccactttgtcagctctggccagggtgactgcagcctgctaccacggtgtggccgcccatgtctggtggcctggggctgcctccaggagaagccttcctggctccatctccctgctacgtcacctgtccctgctatgtcacctggctgcctctctcccctgctcatttggcagccagagtgtctgatgctgctgcgtcagctgggtccctgccctgaaaggctgggctttgaattttattagtaattttatgtatttctatgagagaaatgtggcatgaaatccctttatccttaaaatcccgtttggtagacagccaagccttttaaaacgttagaaagggcggcccctttctcagctggaagcagctgttgcagtgaacatcccgtgcatctgaaaatgtcaggagttagaagaaatgtcaggaagtgttagaagcgatgtgttccctttctctaaagctgtgtatcggacgtgtcattcataaagccattacttgaatagctgagccaggactcagaggctctgagtgtgacaccctgtcctcctcctctcagtgtgaatagctgagccaggacttagttagagtgaccgagtgtgacaccctgtcctcctcctctcagtgtgaatagctgagccaggacttacttagagtgaccgagtgtgacaccctgtccttctcctctcggtgtgaatagctgagccaggacttacttagagtgaccgagtgtgacaccctgtcctcctcctctcggtgtgaatagctgagccaggactcagagtgaccgagtgtgacgccctgtcctcctcctctcggtgtgaatagctgagccaggactcagagtgaccgagtgtgacgccctgtcctcctcctctcggtgtgaatagctgagccaggactcagagtgaccgagtgtgacgccctgtcctcctcctctcggtgtgaatagctgagccaggactcagagtgaccgagtgtgacgccctgtcctcctcctctcggtgtgaatagctgagccaggactcagagtgaccgagtgtgacgccctgtcctcctcctctcggtgtgaatagctgagccaggactcagagtgaccgagtgtgacgccctgtcctcctcctctcggtgtgaatagctgagccaggactcagagtgaccgagtgtgacgccctgtcctcctcctctcggtgtgaatagctgagccaggactcagagtgaccgagtgtgacgccctgtcctcctcctctcggtgtgaatagctgagccaggactcagagtgaccgagtgtgacgccctgtcctcctcctctcggtgtgaatagctgagccaggactcagagtgaccgagtgtgacgccctgtcctcctcctctcggtgtgaatagctgagccaggactcagagtgaccgagtgtgacgccctgtcctcctcctctcggtgtgaatagctggagtcaggacttagaggctccgaatgtgataccgtttctgtcttcctcctctcagtgccatggcttggggtggatactgcttcacactccttcagggtggcccagacacagtaggtttcattttcctttttttttttcttttctctggtggctacaaaagtgaactttttttcttttttttctttttctttttttcttgagacagagtttcgctcttgttgcccaggctggagtgcaatggcgtgatctcggctcaccgcaacctctgcctcctgggttcaagggattcttctgcctcagcctcctgagtagctgggaatacaggcatgtgccaccacgcctggctaatttttgtatttttagtagagatggggtttcttcatgttggtcaggctggtcttgaactcccagcctcacgtgatccgcccacctcagcctcccaaagagctgggattataggcgggagccatggcactcggccctattttgtccgttttcttgagacatcttaaatgaacatatagcttcaggaagccatggtagcagacaggaccacagtgctttccgtgatgtggccgtctcctagagtccagcagaccggaccttcgcaagaaaaactgctgaggagatggagaaggaaaggccaaaagcctggtattcactccagaggcagtcgctgaggagatggaggaagggtcaaaagcctgatattcacttcagaggcagtcgctgaggagttggaggaggaaaggccaaaagcctgatttatcagtccagaggcagtcgctgaggagatggaggaggaaaggccaaaagcttcgtattcattccacaggcagttgctgaggcgatttgaggaggaaaggccaaaagcctggtattcacaccagaggcagttgctgaggagatggaggaggaaaggccaaaagcctggtattgactccagaggcagtcttttgttgttgttgttgagtctcactctgtcacccaggctggagtgcagtggcagaatctcggctcactgcaacctccgcctcccgggtgcaagcgattgtcctgcttcagtctcccgagtggctggaattacaggcacgcgccaccacgtctggctaatttttgtatttttagttgagatggagtttcgccgttattagccaggctggttttgaactcctgcgttcaggtgatccaccctccttggcctcccaaagtgctgggattacagacgtaagccaccatgctcaactaggttttgtgttttttatagagacagcatcttgttttgttgccgaggctggtcctgaacacgtggtctcaagatattcgcccagtcagcctcccagagtgctgggactctaggcgtgagcccctgcttctggcccccaggccagtagtaaaaagccaaatatcatccctttcagagcatcaggacagcggttgtgctcagggaggctgggaatgggcatcgtgccctctgggggtgcggcagggtcagttggctggaggatattcatggtgctgctgccccctgctgccgtgctgagggctgacatggtgaacagtcatgggcacttgcagacgtggttgtgcccagtgctgtgtgcatgcagccgttccagcaaaggtggtggtcacttggaccattgtggtgccatcatggtacagcacccaggcaggagcaaggccgttgtgttctggtgagatgatggttctgaattagatgtggagatttctttgagatcagctccacaggtatcttacgagggctcgggggtgaggctcagaagtcctacaaggaggggcctcaacctgtgtcccttcacctgcagcaacagcaacgcggagcaacctccaggagcctggggggcgcctgggctgggcgggagtcggaggtcggcgaggggaggaaggtggtcgcatgttggcgtcctcctgccctgtaggaagtactgaatggttccccacaacagtaggatgaaaatgagtttctgttccctgatcccacgccactgcagaatgggaggaaggctttatgccggggtgtccaatcttttctcttccctgggccacactgcaagaagaggaattgggccacacattaaaaatctcataatttttttttgttttatgagacggaatcttgctctgttgcccaggctggagtgcagtggcgcgatctcagctcaccacacacaacctctgcctcccgggatcaagcgattctcttgcttcagcctctcgagtagctgggattacaggtgcgcactactgcgcccagctagtttttgtattttgccatgttggccaggctggtcttgaactcctgacctcaggtgatccgcccacctcggcctctcaaagtgttgggattataggcatgagccaccgcgcccggcccataatgttttaagaaagtttacgaatgtgtgttgggcctcatgcaaagccatcctgggctgcatgcagcccgcgggctgtgggttggacaagcttgctttgtgccattaaattgttatttgtaattagtgctggaaagtcagggtttgagaggcagacactgctgtctctgaatggaaaggtccacgtgtgggaatgaggaagccttgctcatgagcaccctgacagagcacccatgcctccagcagtgggagggcaggcgtgacgctgccgattccacattgtatctggaatgtttgttttggagatggagtttcgctcttgttgcccaggctggagtgcagtggtgcgatctcagctcactgcaacctgtgcctcccaggttcaagcgattcttctgcctcagcctcccgagtagctggggttacaggcgcttgccaccacgcctggctaatttttgtatttttagtagacgcggtatttcaccatgttggccaggctggtgttgaacccctgacctccggtgatccacctgtctcggccttccaaagtgctgggattacaggcatgagcctcggtgcctggccttttatctggaatttaaaaaaaaaaaaaatcaaatgtagcccagctgaagctattaaggggattgttgccagctttaaccatgggaaatctgcattcgtgtgtatgtaatgagctctgcagagattcaacaaggcagaaaagcagatgcccttggctgtcaagggcacagtgtccagtggaagccagccgagtggctgcagggtcttggactcactgccctggccccggcttgttgttggccatgctgccctgagcgcaaaccccattcctctagcctgtccccgtttctagtagctcgctctcaggctttctccagtctccctaacttccttttaaagtgttaaatatagtacagcacagaagggtatgaaagggagaagaatacgtaagttggacagtaacaatgtccttgactcctaggaagctcagaaataggtctgtgctgtgcctggatggtgcctccgtgcctggggatctggaagggtggagacagaccccagagcagccgcttccctgcgggggcctctcccaacaccgtaaggccgcgggtgcctcaagcagcgccgagaggggcttgtgtttcagtgacatttccttgaagtccaggtatggggtttctgtaaatgaaggcttttgcctgccttgttctccagtgtcagcctaacactcacgtgagccaaataggcccggccagacccaagacagctcagtcacctgttccgcatcaaacatcagattccagagccggactggaccaacgtcctgccgtggcccagtgagcgagggttgctggcgtctttgggatactcgggagcagcccgccatccccgtgtccccagggaactcttcagagcaccccccagcagcgtggaagcccccggaaatgcaggcttggagtcccccgagggagccaggggtgttgtggtgggaggggcggccaggtgcccgggacggggtgaggcggcgccggcggggcagcctgggaaaagcacagaggtggctttgcagtcccacttcagggggaccctgcctgacctgggatgaggtgtgtgggctttctggggcaggggcggggacaggttgtaaatctgaatttgtctgatgcttcctcagagatctgtatcatggtcatttcatagaaacggcaaactctgtcccagctcaaaaagatgctattagactaatcctttgatctctttacgtgtgcggctcagctttcagataaacctgcttgatgttttgagggttttctcttatttccgttgcttcctcgagggagagtaatccagtctaatttgcatttctcttacttttaagctgagctgctgcgccctcacgggacacagtcatggggagccctctgccccatggtgggcattggtgaagccacagtggtcccgggggcagacctcaagggtgcacagcagcagccccttgggccctgcctgcccaagccccacctggccccacctgccctgtgttggggactttgtatttcagcctccatgcagggtgacgctgggactccccagcttccggttcacggcttcagggtccagcaggttctcctgaagccccatctaccgctggcttcctgctcactctcccctctcccgctctgtctctccagaggaggccgggcctgtggaattaggcggctgcttcacctgaactcactgcagtgccgggaaaggagcctctggaactagacccaggagcggatctgcaaaggctactcagggttctcccagcggctctgaaccccgaggccaactcgccctccaatcacctggcccctgaagcaggcggaggcccctgtgcacagtgggcctgtggccccatttggttcaggagtgatggtgacacggagttggctccatcgaggctcctggcagcattacatcctctaagaataagtcataaagaaagcactccttgtaagatacacgatccaccaggctgcctccaaccacagcctcatctccatccggggtgtgtctaggttttcttttttattattattttttatcatttgagacatgttctccctctgtcacccaggctggagtgcactggtgtgacctcagctcactgcaacctccacctcccaggctcaagcaatcctcccacctcagcctctctggtagctaagaggtgcatgccaccatgcccagctaattttttttttttttttttttgtagagacagggttttgccatgtcacctaggctggccttaaactcttgggctcaagcgatgctcccgcctcggcctcccaaagtgctgggattacaggtgtagccaccatgcctggccagtatctaggttttcaagttagacttagttttatttgcagaaagaataatgaatacattattaacttattctttgatagttagaaattaataggcattttatatgtgatcttatggtcttactcttggttggctgtttctgaaggagtggctttgttatctgtaatttgtctaatttaaaaatcaattataatgaaaccagcatatgtgattcacaaggcttttttccacctggaccagagtacaccagctattgcattgccaaaagtaggtgtgttcctgttgtgtgatgtgcagatggggggcccctgcagcagggaaggcaggccaggaaaccccttcgcagtctctgctgaggggctggacccgctgcttgggcgggactccccgcagggtgctctgctgcagtctcctcctctgcccgcctgcggcccagagaactctgaatgctaatggcaatgccagctgcttggcagcatgagcttcttggggcgcctgggcaggcctgggcacttctgccctttgtgccatccgcagtcctgtgatttcctgacagtttcctgaaagcgcagaatgggacttgtcgatgtccttggctgcggaaacgcggtgtcttgtcctaaccttctgcaacgcacacacacctcttccgcagtaatgaatggttttttgtttttgtttttgagacagagtctagctctgtcacccaggctggagtgcagtggcgcgttctcggctcactgcaagctccacctcctgggttcatgccattctcctgccttagcctcgcgagtagccgggagtacaggcacccgccaacacgcctggctaatttttttgtatttttagtagagacagggtttcaccgtgttagccaggatggtctcgatctcctgacctcgtgatccgcctgcctcagcctcccaaagtgctgggattacaggcgtgagccaccgtgcccggctaatgaatggttattttaaaaaataaacgtatttcgggataattttaggtttacagaaaagttgcaaagtgagcgcagagggtcccttctgccactccgcagcctcccctctgtaacttcaaagcccacagggcatggctgttgtagctgagaaaccgtcgctgggtgtccctgtgaactccggactttgaatttcactatcaatgtcctgtttctgctctaggaccttgtccccgctgccacctgtgggagacagcctcccgtgcaccatttgcccagcaccctcaggcctgtgacggtctctcagtctttccttgtcttccatgccctgcagttctgagagggcctggccaggcagtttgtccaggtgccccgatccaggcttgtcttgtgctttctcgtgggggtggacgacaggtttcagggaggggtgctgccgcctgtctcaccccactgtggcgtccctgacatccaagtgacattacagacagctctgaccttcctcaccagagtcaggtgtctgtaggtgtctccttggtgacaggactgcttctccctttgcacatttagtcaggcagcaagtccacggccgtgggggggcttctcctagacgggaggatctggaatagcttggacttgtatttatttatttgatcatttgtttgtatccggatgggctcattttatatgtgttttaaactctgagctagaaggcaacactactttcttgtgaagcacaccatctgtccttggccctagggagctcctgccgtcggctcctgggtcccctgatgcacccctttcaacagacttttcattttggggtacgtcctgacttcctggcactgcagggtgctccagcctcctcttgcattccctgccctggcccgggaatcagccccttctccaaggagccccgggtccttttattggcaagtcttaagagagtgaggcctgggtgccaggcagggagccccaggtccttttattgggaagtcttagagagtgaggcctgggtgccaggtgggtgccaggtgggtccggtgctgctgggatgttgtcacgtggaggccctcagctgcagagcagggacgagggtgtcacctgttcagctgcagagcagggatgagggtgtcacctgtgtgtatgaacatctccgcagccacttctgtatctgtgaagagaacatgagttcatgctactgcctctgactctaattcagaccccaaagctccttctaaccttcctagaacgttatttttcagtttaaaaaaaaaaaaaagttttgcaaagggcataccgcgaaaggcccaagtggttgaaagtcccagctgaggctgaagaggcgcctgcgaggcaacaggacaggcttcccgttcagttcaggggtgctgtcctccaggaactatgctggggggcaagtacaggacgtcctggtgtgtggtgcacagggactgctggacacggagacccgtgcccttctcagcgtgggggccgctccccgggacagtgaccacgctcccgccagcctcccaccccacctgacctctgtctgtgaggggctggaccagggtcctgcctggcccggccatccacagagcaacccagaatgttaataaagcctgcagaagctgtgttctccttcgagaagcttctctgtggttacagactttttaagaaatattttgtcggctgggcttggtggctcatgcctgtaatcccagcattttgggaggccaaggcaggcggatcacctgaggtcaggagtttccgagaccagcctggccaacagggcaaaaccccgtctctactaaaaatacaaaaattagccaggcatggtggcaagcgcctataatcccagctacttgagaggctaaggtggaagcattgctcgaatctggaaggtggtggttgcaatgagctgagatcgtgccactgcactccaggctgggcgacagagcgagactccatctcaaaaaaaaaaaaaaagtttgtcatttaaagtagaggcacaggccaggcgcggtggctcatgcctgtaatcccagcactttggggggccgactcaggtggatcatttgaggtcaggagctcgagaccagcctgaccaatatggtgaaaccccatctgtactaaaaatacaaaaaaattagccaggcgtggtggtccgtgcctgtagtcccagctgtggggaggctgaggcacaagaatcacttaaacccaggaggtggaggttgcagtgagccgagattgcgccactacactccagcctgggcgacagagtgagactccatctcaaaaaaataataataataataaataaataaagtagaggcagggggcaacctaaattagcaccaaaattcctcctaatgctcctgttttctgaagtgagtgactgaatgtcggagctctgaatgtcttacaactggaaaaatgttaaagatcacgtttgcgaaggagggaggcaagcatcagaacagaacctcggagcaggtctgcacgcgtgcaggggccgtggggccgcgctggagtcgtttcctgtgctgctctgtgctgctcacagacgctgccactcacccactggccacggcccctcccgcagctgcggatgatctgggcgcatagcgggcgtgcaggtcgcggcgccaaggcctctcctaggcccagtggtcttctccgtctcagagagcattgacggcggagctcacaactgtcaagcaccttagtcatgccgcaaacattaatcattgacagcatgttgacctatgcgctgattaaaaagaaaagctccaataatgtaattccaggagaaagtacacaaacctctggtggcatcttttcaatccaccacagaaaccagctcaggtggggccgtgggggtgttggctggggcaccgccgcagcagtttgggacacatgcctgccacggtgcgcccaggctgatgcccacagccctgctcaggagtgttgggagcggtggactcctgagtttgattttctgtgctggcctggctggagtgaagctccttggagtttggagaaagatttccatgctgatttccctttgtttttgtttgtttgtttgtttgtttgttttggagacagtcttgctctgtcgcccaggctggagtgcaatggtacaatctcggggtttcaccgtgttagccaggatggtctcgatctcctaacttcgtgatccgcccacctcagcctcctaaagtgctgggattacaggcatgagccactgcatccggccctgatttccctttttttttgagatgggagtctcgctctgtcacccaggctggagtgcagtagtgcaatctcggttcactgcaacctccgcctcctgggtgcaagctattctcccacctcagcctcccaggtagctgggattacaggtggccaccaccacacccagctaatttttgtatttttagtagagactgggtttcgcaacgttgcctgtgctgaactcctgacctcaggtgatccacccgcctcggctgcccaaagtcctgggattacaggtatgagccgctgctcccggcccatactggtcttccagtgaatgaatgtagggggcaaactgcactgaggccaggaaagagctgattctggaggtgacaagaacgttctgagcagcactggggcagaggcgcagtcaagagtccaatgggagctgggcgcagtggctcacgcctgtaatcccagcactttgggaggccgaggcaggtggatcacgaggtcagaggttcaagaccagcctgaccaacatggtgaaaccctgtctctactaaaaatacacaaattagctgggcgtggtgtcaggcacctatcatcccagactcaggaggctgagacaggagaattgcttgaacccaggaggcggaagttgcagtgagctgagatcgcaccacggcactccagcctgggcgacagagtgagactccatctcaaaaaaaaaaaaaaaaaaaaagggggtccaatggggggaacttggggcctcctgcctgcacctgcctctgtccccggtgtctcaggggctctccacggccacgtcactgactggcctgttgtgtccttcttgcagcagtcctgcgttaactgcggccgggaggctatgagcgagtgcaccggctgccacaaggtcaactactgctccaccttctgccaacgcaaggtaggtctcacctacaccaggctcagtgcccccgcctcctccctcgctacgaagacccctgggtggccctccctccccttgtgctcctggtgccacacctgactcccctccctgtccctccctctgggaatccggggctcctgcctggctccgtgaagaccctgcagaaggctcacatgtgacatggccaggtagtgctctcatgtgaggccccacagttggtggccggaaaccctgagggctgctggtcagtgcttcccagccctccacacccctgcacagccacgcaagagagactgtccacagttccattattgagccctccacacccctgcagagccacgtgagagagactgtccacagttcctctattattcagccctccacacccctgcagagccacgcaagagagactgtccacagttcctctattattgagccctccacacccctgcagagccacgcgagagagactgtccacagttcttctattattgagccctccacacccctgcagagccacgcgagagagactgtccacagttcctctattattgagccctccacacccctgcagagccacgcgagagagagcgtccacagttcctctattattgagccctccacacccctgcagagccacgcgagagagagactgtccacagttcctctattattgagccctccacacccctgcagagccacgcgagagacagcgtccacagttcctctattattcagccctccgctccacagaaattcaagagaaattttgtaggctacaaacggtagttcaggattgtataactttgtctaccataatcagagtactcgggagcatttagtcactctttttttttttttttttttttttttttgagacagagtctcattctgtcacccaggctggagtgcagtggtgcgatcttggctcgctgcaacctctgcctcccgggttcaagcgattctcctgcctcagcctcccgagtagctgggattacaggcatgcgccaccatacctggctaatttttgtatttttagtagagacggggtctcaccacgttgggcaagctggtctcgaactcctgacctcaggtgatccacccaccttggcctcccaaagtgctgggatttagaggtgtgagctactgttcccagcagctttactaatctttttgatggtttttttttctcatatttatgagagatgctggtctatattttgtcctgtgatgtctttgtttcatgttggtgtcagagcaacactggcctttcagatcaattgggaagtgtgcccttctgccctccttctctattttctttttgagacagttttgctctgtagcccaggctggagtgcagtggcaagatctcggctcactgcaacctctgcctcccgggttcaagtgattctcctacctcagcctcccgagtagctgggattacaggcatgcacctccacccccggctaatttttatgtttttagtagagacagggtttcaccatgttgcccaggctggtctcaaacttctggcctcaagtgatctgcctgcctcggcctcccaaattgctgggattgcaagtgtgagccacggcacccagcctgtgtttcatctttattcagttcgaatattttatgcagttgaaaatatttgccgtgtgatttttttctgtgacctatgagttatttggaagtgtgtgctggattcaggagtagatctaaaaaagaagtatgctaatttcaaatatttctggatttcttaaatgtacctttataattaatttctactttaattacattgtggttcaagaacatacttagtgtttttcagtacctttaaatttattgagatttgtgttagggcctagcgtatggtcttatcatggagagtgttgcttgtatattctgctctgttgggtggagtattagatatcagttaggttggttgatagtattgttcaactctttcatattctcactgattttctctatttgttctaccccttatttagagtgaagtgttgaactctccagctattactgttgaattatctggtttttgtttttgtttttgagacggagtctcgctctgtcgcccaggctggagtgtagtggcgccatctcagctcaccgcaagctccgcctcccaggttcacgccattctcctgcctcagcctcccgagtagctgggaccacaggcacccgccaccacgcccggctgattttttgtatttttagtagagacagggtttcactgtgttagccaggatggtctcgatctcctgaccttgtgatctgccctcctcagtctcctttcaaagtgctgggattacaggcgtgagccaccgtgcccagctgaattatctgtttttatctgccattatgcctgtttttgcttcatttattttgggtctctgttgttaggtgcatgtatgtttagtttataattatcattcctgatgaattagctcttttatcattataaaacatccttctttgtctcaataagttttttattttttatttaattttttttttttttttcttacagagatggagtcttactatgttgaccagcctggtctccatctcctggcttcgggcgatcctcccatgtcagcctcccaaagtgctaggattataggcatgaggcactacaccagccaacagaagtttttatattaaaatttactttttctagctgggcacagtggctcacgcctgtcatcccagcactttgggaggctgaggcaggtggatcaccggtcgggagtttgagaccagcttggctaacatggtaagaccccatctctactaaaaacacaaaaattagccaggcgtggtggcgcgtgcctgtaatcccagctactagcggggctgaggcaggaggattgcttgaacctgggaggcggaggttgcagtaagccaagatcactccactgcactctagtctgggcaacagagcgagactccatctcaaaaaaaaaaaattaccttttctgatagtagcatagacactccacctgtcttatggtgaatgtttgcatcttttacttttgagacagagtctcactctgtcacccagactggagcgcagtggcatgatcttgactcacggcagcctctacagatacacgccccacgcccagctaattctttgtatttttagttgagacggggtttcgccattttgcccaggctggtctcgaccccttggactcaagtgttccacccccgcttggcctcccaaagtgctgggatgacaggcatgagtcactgcgcccagcctgcatctttttaaaaaaaacctttttggctgggtgcagtggcccacaccagtcatcccaacactttgggaggccaagaggggaggatctcttgagcccagggccagcctggccaacaaagcgagaccctgtttctattttttaattaaataaacatataaataaacaaacatcttgttacttctaattttgtgtccttggctcttaagcattcccttagagacagaatgtggttggatcttaggttttaatctagtctgatagtctctgccttttttttttttttttttttttttttgagacggactgtcactctgtcccccaggctggaatgcagtggctccatctccactcactgcaacctccatctcctgggttcaagtgattctcatagctcagcctcccaagtagctgggattacaggctcctgccaccacactcagctaatttttgtatttttaatagagacgggtttcaccatgttggccaggctggtctcaaactcctgacctcaagagattcacccgcctcagcctcccaaagtggtgggattacaggtgtgaaccaccacactagtctctgccttttgattggagtgtttaatctacttttttgttttgtttttgtttttgtttttgtttttgttttttagacaatctcactctgtcgccaggctggagtgcaatggcacgatctcagcccactgcaacctcaacgtcccgggttcaagtgatttcccttcctcagcctcctgagtagctgggattataggcatgagccaccacgtccaactaatttttgtgtttttagtagagatggggtttctccgtgttggcaaggctggtctcgaactcctgacctcaggtgatccactcgcctcagcctcccaaagttctaagattacaggtgtgagccaccgcactggaactcggcctgttttgttttttgaattgagacagagtatcactttgttgcccaggctggagtgcactggcgtaatctcggctcactgcagcctccacctcctgggtttaagggattctcgtgcctcattctcccgagtaactgggactgcaggagtgtgccatcagacccggctaatttttgtacttttagtagacacagggtttcaccatgttggtcaggctggtcttgagctcctgacctcaagtgatccgcccgcctcggcctcccaaactgctgggattataggtgtgagccaccacacccagctgttttgtttttttttttaagtggggtctctctctgtcacccaggccagagtgcagtggcacaatctcagctcagtgcaacctccgcttcccgggttcaagcaatactcctccttcagcctcccaagtaactgggattacaggcacccgccaccatgcccgtttttgttgttgttgttgtgtgtgtgtgtgatggagtctcgcacggttgcccaggctagagtgcagtggcgcaatctcggctcactgcagcctctgcctcccgggttcaagcgattctcctgcctcagcctcccaagtagttgggattacaggcatgcaccaccatgccaggctaatttttgtatttttcgtagagagagggttttgccatgttggccaggctggtcttgaactcctgggctcaagtaaccctcccaccttggcctcccaaagtgctgggattataggcatgagccactgcgcaaaacctaatctcatgtttaatgtaattatcaatgtgagtggatttgtgtttatatttgcagtttatgtttcatgttttgctcctctgttctttcactgccttcttttctgttaaatgtgtattttctagttgtgttttctagtgtaccacttcaattcttttgttgaacatttttaaacagtatctttaaagttgttattttcttactgctataggtattacaatatacattttaatttatctcagtttcagtaggaggatagaatttcctcaagcagggaaagtgtactgcagaggctgagtgtatacattcctggcaaacactatttgggccccaatataagcacttactgagctcctttcacctacagaacgaacacatcccgttcttttaaaagctgccttccagccggacctccagcccaggacaccctgtcctcaagcctccctcagatcctgttctttaaaaagctgccttcagctgggcacggtggctcacgcctgtaatcccagcactttgggaggccgaggcgggcggatcacgaggtcaggagatcgagaccatcctggctaacatggtgaaaccccgtctctactaaaaatacaaaaaaattagcttggcgtggtggtgggcgcctgtagtcccaggtactcgggaggctgaggcaggagaatggcatgaacccgggaggcggagcttgcagtgagccgagatcgtgccacagcactccagcctgggagacaaagggagactccgtctcaaaaaaaaaaaaaaaaggcagtgataattttaaaaattaattgtagaggacttggtatgtacacaaaagtatacacgagtttatgcatgttatgaagccccaacaggaatcccctgctcccagcaccgcctgggtcaagtccacccacctgctcccagcaccgcctgggtcaagtccacccacctgctcccagcaccgcctgggtcaagtccacccacctgctcccagcaccgcctgggtcaagtccacccacctgctcccagcaccgcctgggtcaagtccacccacctgctcccagcaccgcctgggtcaagtccacccacctgctcccagcaccgcctgggtcaagtccacccacctgctcccagcaccgcctgggtcaagtccacccacctgctcccagcactgcctggattgagtcacctacgtgctgtggtggcaacacttttcttttaatccttaactttggaaaatgtgagacgtgcacatgagttggatcgcccaggagaggcccgtcgccctcacctgtatcagctgctttagcgcctgccctcctggcttgtccccctctctctttgggctgagggctgagcattttaaagcaagccccacgcatcattattttcatttgtgaggcctggatcactgtaagtcagatttggattgtgttttaattggatttttagtcactgtttttatttcattacttatttttggtttttatttgttcgtttgtttttggttttgtttctgtttttgagacagggtctggctctgtcacccaggctggagtgcagcggcgcgatcttggctcactgcaacctccacttcccaggttcaagcgattctcctgcctcagcctccctagtagctggggattacaggcacccgccaccacgtccggctaatttttgtatttttagcagagacggggtttcaccatgttgttcaggctggtcttgaactcctgacctcatgatctgcctgccttggcctcccaaagtgctgagattactggcatgagccaccgtacccagcctattttaggttttctatagacagggtctcgctttgtcacccaggctgcagtccagtggtgccatcacggctcactacagccttgatctcctggctcaagtgatcctcctgcctctgtctcccaagtagcttggaccacaggcatgagccaccacacccagctaattttaaaacatttttttttttttatagagatagggttttgctatgttgctcaggctggtctccaacccctgacctcaagtgacctcaacctcccgaagtcattgtttttacagtctgtgatgttggcttttctcatttatttgtatcaggcactttcattgttagcttcttgtgaatttaaccatttttttccgtttttcaaaaactgaaacgctaacttctaattctggcttttcagataatgatttttttttcaaaagtgttttagcattatactgtaagaagcatcacattgatgtttaagatggaaaaatttgctttaaaaaagaactgagtagttctgattttaaaagtcaaccctgggcctttgcctctttgctggaagaacctgatggaagcttctgtagctcagagtcaacactgatgtgcgccctctctccctccatctgcacaggccccagggagtggctcaaacctgtagaccagagaaggaagcatctagaactcctgggggccttgtccgccgcccacatcctctcacggggggcagctcccatgaggggtgcaggcccctcaccccacacagagtctcggcaggaaccggaacccttcctggttgccccagagtggaggcccgggaggggcgggcggtgggtctgcacccgatgctgcagtttgctgatgtatgtgctttcatgctatgtagatttatagtctattaccaggtaattttaattttttttttttttttttttttgagacgtagtctcactctgtcgcccgggctggagtgccgtggcacaatcttggcttactgcaacctctgcctcccaggttcaagtgattcttgtgcctcagcctcccaagtagctgagattgcaggtgcgcatgaccacaggcggctagtttttgtatttttagtagagatggggttttgccatgttgggcaggctggtctcgagctcctggcctcaggtgatctgcccacctcggcctcccaacatgatgggattacagccgtgaaccactgcgcccggcctaattttgctcttttattataatcagctggaattctgctctctagggaataactctgtcaccatttggaagcatttatttctgctctgtgtgtcatatacgtacctatcacgcccccgtgcacggagctgcctctgtctgacgaggccgtctcagcttcagcacctggcgcttcctctagagctctgctccattccgaggtgctcgacgtagcagggaggcagagcctggttctgtgtgctgacctcacaggagctgtggcttctcccaggcaccatcccccacctcctttctctgcagccacgggctggttccagtttgctttttcatctttgccattaaaaacagaactggggcggggcgcagtggctcacacctgtcatcccagcactttgggaggccgaggcgggcagatcccctgaggtcaggagttcgagaccagcctgaccaacatggtgaaaccctgtctctactaaaaatgcaaaacattagccaggtgtggtggcgtgcacctgtaatcccagctgctagggaggctgaggcaagagaattgcttgaacccaggaggcagaggtcgtggtgagccgagattgcgcgttacactccagcctgggaaacaagagcgaaactctgtccgaaaaacaacaaaaaaacccccacagaacttgatcgtaatttacatatgtaatatttacatatttaaatgtttttctgcatgtgtgatattttttgtttacatccctaacacaaaacaactggtttggagagtcttaccctggtttgttgtttgactttttttttttttttttttgatatggagttgttctgtcacccgggctggagtgcagtggcaccatctcggctccctgcaacctctgcctcccagggctgagcagttctcctgcctcagcttcccgagtagctgggattagaggtgcctgccaccatgcccagctaatttttgtatttttagtagatacggggtttcaccatgttggccaggctggtctcgaactcctgacctcaggggatccaccctcctgggcctcccaaagtgttgggattacaggcgtgagccaccgtgccctgcctgttgtttgccttttgatccaattcctcaaaccaagagagtgtggggaaggctgtattggagcagagcccaccagagtttgggcgcacgggggctggggagggcattctcagcacctccaggtgaggttacagagggctgcaccctctggggtctgccttggggaccctgcccagaccctgctccacccactgaccctgctgacatgggtgtgtcctcccttccaggactggaaggatcaccagcacatatgcggccagtcagcagctgtcaccgtccaggcagacgaagtccacgtggctgaaagcgtgatggagaaggtgaccgtgtgaggctccatcggccgccctgggagctggggcccctcgcactcctgtgaggcttttgcaggtcgaaggcccccctgaggactctggggggacgttgagaagaggggtgtgggaaggtaaagaaacttgctggacaagtcattaacacactttaagcgaatggtgccctgggaagcgcactccccctgcccgggccccctgcccgctcgcggacagattttttatccctgggatcatgagcgtccggtcttgcccacagggcctgtgctgcgacgcacatacatacgtgttgtgtctgtcaataaagtgtaaataaggtc

SEQ ID NO: 15543 - DNA, 31010 bp, Homo sapiens
catctcaggatgggatcttaaaccctcacgctgcctcttgcacctgtgctgcctgctgcgacgacatgaccttagtaagtggccagcgtgtctggaacaggatgacttggtggggctgggggcggctgagtgggtcccacagcccttggcctctcggctgtttccctcctgccctctgccttggagagagacactgtcctcacttctcctgggttgctctgttccctcctccctgatacgtcacagtgaatcctgatgtctcgatggggaacacgtggttggcccccaagatgttgctcaaagaacatttgtggaaaccttaaataatgaaaagcggttataatgtcaccgccttaactctaaaactaaacatacacgcttttccttgtatgcatgccattttatattcctcattttgtaacatgtcagaaaaatgctactgtaaacttattcatgtgtagagcttttaacgcctttttgacgtatttccttattctaaattcttaactgcttcacaaagacccaaaataatttttctttctttttttttttctgagacgaagtctcattctgtcgcccacactggggtgcagtggcgcggtctcggctcactgcaacctccgcctcctggattcaagcacttctcctgcctcagcttcccgcgtagctgggattacaggcatgtgccacaatgcccagctaatttttgtatttttagtagagatggggttttgccatgttggtcaggctggtctcaaactcctgaccacatgtgatccgcccgcctcagcctcccaaagtgttgagattacaggcgtgagccactgcacctcaaaaaaaaaaaaaaagagcatggagagacctaccgtgttcttggggtgaaacactaaacatcctagaattgtgtagttgatatatagatttcatgtgattctagtggaaaaaacaattttgtgaacgtaaaataattttgaagttgattgggaaaagccagtcggtgagactcttagagacgctgcaggagtaaaggagccgggaggagacgtcggtcccattggcagttgagcctgcaggtagatcatttgcaggggctccaacactgaagtacttagatgtcagtctaggaaatcatgtacagggtttgtacgtggaagatactaaagaaaatgctgaagagagagaccagggaagattgaaatacgtcaaaagacgtcctgcgcccgtggattagaagactcagtaaagatgcgactttttcccaagttgattcgtaggtttaacacaatgactatcaaaatcccagcaggattctttttagatgcagacaagctgattctaaaatttgcatagaaaggtaaaggaaataaaaaagccaaaacagttttgaaacaaaaaagccaaaacagttttgaaataaaagtttaaaatgggtggaatcacattgcggggtcttaagacttacgggctcgtgacagtaatcaagatagtgtggcactggcagagggagagaccccacgatctgggtcagactagagtgtcatagtagactccagcaaatggccttggagtgacaggacgttcatcagcagagacaaaggatgacctaaacttcacacttggtacaaaaatgaattcaaaatgggtcatcgatctaaagtgaaaggtgaaactataacatttttaggagaaaacacattggaaaatcttcctgacctggagttagaactaggatttcttggattggacttcatcaaattttagaacttttggcttccgcttggggagtggtggtgtgatgagctcagtggaccaactctccagagaaataactagtgaaaattgtgaaaaaataaccccttaaggtctccagaaattgtcctaggggagtacagcaaataaacatccaagaaaatgtagtaagtcttggaaagggcagtgaggattgtgacgtttgagctacgaccagctccttccctccctttctgcccccagctccctatggtggaggctccattgtgggtggttgtgaccaagaaaacggttcccactccttgcagttcccggtcaagggatatggtatctcactgggaggggcaggccaccagcatttctcaaccccttcagctctaagttgcagtaaattcctgggaagtgtgactgaaaatctcttcagtcatccccactcagagggcagaggctttacccaggcatgggaggccaagcatacggagccccaatttccatcaacccacattgcccatagggtggggtgtccatgcagtgagaggctgctgccccccacacagaacccggctaatgcaacagaattccctctgatagactcaggcactgttcctgcctctaggtctatagtaggggctcagacattcagcccaaaagagagagaggccgtaagaacagagagctccaaagcccctcccaaaggaactgacttgatttgaaacagtatggggatgttcaagcctaaaagtgccctggaaaagaatggacattttgatggtaagcagttaagaggaggccagcagttccattagagcaagaaactaaactgtaggtcagcaggtttaccagagaggcgaggaaagccacagcgaagaacccatctgggaaaccgaccttcaagatcgaacctctcagtaaagaagccctaatttaattggctcagacagtggagcagtgtgtgccccagggcattgttgaaagtaatggagcaggcagctggcagttagttgattctgacacttgactacaccaacagcttaacagagatcaggaagagcgacagccaaaactcccaccaccaaaggtgattgcaccccacccagggccgagccctcagaggagcagcagccgaggccgccccaggagaacaggctcagtaagatagtccagctccgtacctgagtaataaacaagctgacagcagcaaggatcccagagaaaggagaactgctttccactgttgctacaatgtatcacctgcggtgtctgattcttaacaaaagatgataagacatgcaaggagccttggaccatacacaggaagaaagcaggcaacagaaattgcctggagaggtccggatgttggggttaacaggaaaaagctttaaaatggctatcctcagtatgttcagaggactgaaggaaaccacagctagagattgcatggaaggtctgaagacactgtctcctcactggagaatgtcaatgaagagatataaattatttaaaaaaaaaagtcggccgggcgtggtggctcacgcctgtaatcctagcactttgggaggccgaggtgggcagatcacgaggtcaggagaacgagaccatcctggctaccatggtgaaaccccgtctctactaaaaatacaaaacactagccaggcttggtggcgggcgcctgtagtcccagctactcgggaggttgaggcaggagaatggcatgaacccgggaggcagagcttgcagtgagcccagattgtgccactgcactccagcctgggcaacagagcgagactctgtctcaaaaaaaaaaaaaaaaagaaagaaagaaaattagccgggtgtggtgacacatgcctgtaatcccagctactcaggagactaacgcagaatcacttgaacctgggaggcggaggttgcagtaagccaagatggcgccactgcactccagcgtgggcagctagagtgaaactccgtctcaaaaaagaaaaagaggtgggatctttaggggcgcttaccatcttaatgtggtctcaccatgtgactcacacaccccgcggtgcccccacttaaggaggagttgcaagcgcagcatagcttttgcacacatgaaggtggtggcctctctcctttctcccccagagtggcccagtcaggctttttgtgccttacaaaaggcgcaagaaggagaatgaactgcccacaactcccgtgaagaaggactcccccaagaacatcacattgcttccagccaccgcggctaccacctgtgagtttgagaaaacacagctctagtttactgaggggacctgagtgcattgccttctctcgtcaccactcccacggccactgcgggattctcacttctaaagcacattgcgtggccagagggattccaacgccatcacactcctttgcagtgcgtcccccgggtgggaaggggtgtcccagtgcccagctcggtcttgcttccctgggacccggacactgttggccttgtcctgggctgtttcctagtatgagtgagcatggctgagtgcccagcacacgctcaggggacgtttcctgacaagggcgtccttggtgagggattctcagtgcgctggacgagggctgcggagagctctgtgggtctttctctgtggccgggctggagggcggcgtcaggatcccggctcgctgcagcctcggcctcccaggctcaggcactgctctcacctcagcctcccaagtagctgggaccacaggcacgtgccaccatgcccagctaatgtttttatttttttgtacagacaggatttaaatggggagaggtagcaataggagaaaatgtctttgtaataggcttttgttaactaagtctgggtttttgcatttatagagtaaggtctttctaaaacaccctgtcagctccttcctgaggccctgggtggtgggtgcaggaagagtcccacagcagcagagtctcaagatctgtcgccaggatttttttttgagctggagaggcagccttgctgtgggacacagggcagccttgctgtgggacacggctgctttttaccttcagcttggattaaagattttttcttaattcgaaccacgaagtacttaaaaatcactgaaagttttattttatgtttgttttctggctgggcagcacatttccatggttcacagtttaaacagcgaacaattggtagtggcaagttgccatcctggccatcctggttttctcctgtgaggtcttctccaaggtctgggatttcccccgtgtccttcacatgggagggtacagttaccactgcccgcccttcagcccaggcccccacaaggattggcgcccgtgggtggcacgggacctgtgtgccgtgggcgccactgcctggccgcgtgaaatgtgcttctgcctttccagtcaccgtgaccccctcgggacagatcacgacctcgggggcactgacctttgaccgagcgtccacggtagaggccactgctgtcatatcagagagtccggcccagggcgacgtcttcgcaggggccacaggtgagctgctccagtgcctgcctgacgcgtcctcagcatatccctgtctgtgacatcacatccccgacgccacattgggctgcataggctgctgggtgcctcgagaggggccttgaaccaggcgtttgttggtggggacagcgtgtgagccacgtcaggtgggcggtgcagtgtggatggggttggcgtgtggcagtgggttacttgtgacagatgccagaactggcaaagctgaaaatactctctgtctgccggctcctgcttttgactgcagttgtgcaacagaaatgcagcctagctggttgtgtgctggagaatattctagaagccacactgaggaaaatagagttagaactgatttttttttttttttgaggtggagtctcgctccatcccccaggctggagggcagtggcatgatctcggctcattgcaagctccgcctcccgggttcacaccgttctcctgcctcagcctcccaagtagctgggactacagcgcctgccaccatgcccggctaatttttttttggtatttttagtagagacagcgtttcaccatgttagccaggatggtctctatctcctgacctcgtgatgcgcccatcttggcctcccaaagtgctgggattacaggcgtgagccaccgcgcccggcctgatttttataatctattttatttcacctgatatagccccaatcctattatgtcaacgattcaggatcaccacatttcaggggctcagtagccacgtgtggccataagctactatgtgtactgaatggcgcagccatacagcgtgatatttagagtctgctgtgcggacaaccatcccgagcctccctgtcctttttctccccaacagtccaagaggccagcgtgcagcccccatgcagggccagccaccctgagcctcactaccccggctatcaggacagctgccagatcgcaccgtttccagaagctgcgttgccaacgtcacatcccaaaataggtaggtttgaaagaattcacacatgtacaggttattgtcctcagaattgcttccaatgaaagaattcctaagtgaaatgggattcattttggtttggtttgttgtttttgttgatgcattagatcagtggctggtaaagtgtggcccactgcctatgtttgtaaataaagttttactgacacacagccacgtccattcatgtgtgtgctgtggaagttgcttttggtacagcagcagggcacgcccctagaaaccagttggcctgtgaagcctgaagttctttctggtgagtttgctgttgtcctcttgagggtagacactccccagtggcaggtcttggtctctccagagctggcatagacattcggtatctggtgaaagaaagaaaaaccaaggcctaaatgtggcctaaatctttaaaatgacgatacactgtaaatgcattctaactttgatttttcgtttaactgcacttctatttttttgagactgagtctcgctctattgcccaggctggggtgcagtggcgcaatcttggctcactgcaacctctgcctggttcaagtgattctcctgcctcagcctcccaggtagctgggattacagatctcgaactcctgacctcaagtgatccatccgcctcagcctcccaaagtgctgggattacaggtgtgagccaccacatgcagccaagatttctgtataattatacgttttttgtttttttttttgagacagagtgtcactctgtcgcccaggctggagtgcagtggtgcgatctcggctcactgcaacctctgcctgccaggtttaagcaattctcctgcctcagcctcctgagtagctgggactacaggtgcacgccaccatgcccagctaatttttttttgttattgtatttttagtagagatggggtttcaccatgctggtcaggctggtctcaaactcctgacctcatgatccacctgccttggcctcccaaagtgctgggattacaggcgtgagccatcgtgcccagccatcattatacttttttaaagggtgcatatgatcaatacatgattgattgaaccctcccctgctggtggcaaatgcatgttttccatttttcactgtcacagacagcgcaagaaacttgttcatgaaaaacttaccttttcattttcatttgcttgtttcattattctctcttttgcctatctaaactctttccatctttaaagcttacctcagggctgggcgtggtggctcatcctttttttgttttttttttgagatggagtcttgatctgttgcccaggctggagtgtagacttcaggcacgcgccaccatgcccggctaatttttgtatttttagtagagatggggtttcaccgtgttggccaggatggtcttgatctcttgaccttgtgatctgcctgctttggcctcccaaagtgcttggattacaggcgtgtggcttacctgtttaatcccagcactttaggaggccgaggccaggagtttgagaccggcctgggcaacataaggagaccccatctctattaactggaaaaaaaaaaaaagtgtggggtgggtgttggtgaagtatttataccaagaaatcagcaaatgcttgaaatcagagctttttctccaggagggctggggttcgcatcgaccgcttgcccctggtacaaggtgtgcatgtggctcctggatctctgtccccaggtgcccttggtgggcagaagtcagaaatgttctcatgtgcacgtgtgcgtgtttgtgctccaaatctgtgtgtgttgaaaaccatgagtttgccccagtgtctctagttccagtgcagaacctcagggtttgtgctagttcctttgtaactttcttctccaattgtaagaaaccccgctgggcgtggtggctcacgccggtaatcccagcgctttgggaggccgaggcgggtggatcacctgaggtcaggagtccgagaccagcctgaccaacgtggagaaaccccatctctactaaaaatacaaaattagccaggcctggtggcagatgcctgtaatcccagctactcgggaggctgaggcaggcgaatcacttgaacccgggagggcagtgagccaagatgatgccaccgccctccagcctgggcgacacagcgagactctgatttagccacttccctcccctggtcattgtccacggcgctgattctgcgaacatttcagggtccagcagccgcattcagatgagttgtacaacatggagctgggtgggtggagcaggaagggatgggacatcctcctgcctgtgttgcctgctggggggatgtcaggctgagtgctcggggatgtcaggtgctggggggatgtcgggtgctggggggatgtcgggtgctgggggtgtcgggtgctggggggatgtcaggctgcgtgctgggggatgtcaggtgctggggggatgtcaggtgctgggggtatcgggtgctgggggatgtcaggctgagtgctgggggatgtcaggtgcttggggatgtcagatgctggggggatgtcaggtgctgggggtgtcgggtgctgggggatgtcagatgctggggggtgtcaggtgctgggggggatgtcgggtgctggggggtgtcggatgctgggggttgtcgggtgctggggggtgtcgggtgctggggggtgtcgggtgccggggggtgccaggtgccccgggggatgtcgggtgccgggggatgtcaggctgcgtgctgggggatgtcaggtgctggggggtgtcaggtgctggggggatgtcaggcagtgatttgttgtttgctggtcagttttttacccgacttcccaacattgcgtgagagttttcttttcttttcttttttgagatggagtctcactctgtcacccaggcttgagtccactggcaccatctcggctcaccacaacttctgcctcccaggttcaaatgattctcatgcctcagcctcccaggtagctgggattatagacgcttccacgcctagctaatttttgtattttttggtagaaatggggtttcaccatgttgaccaggctagcctcgaactcctgacctcaagggatctgcccgcctcggcctcccaaagtgctgggattacaggtgtgagccactgtgcctggcctcttttctttttgagacagggtctcattaagtcaccaaggccgaaggacggtggcgcagtcatggctcactgtagcctcgaccacctgggctcaaaccatcctcccgcctcagcttcctgagtagctgggatcacaggtgaatgtcaccatgcccatctagttctttgtttttgatttctgttttgtagaggcaaggtcctgctatgttgcccaggctggtcttgaactcctgagctcaagtgatcctcccacctcagtctcccaaagtgcagggattacaggcatgagccactgcaccgggtgatgagaatttttatttattttttatttttaaattttatttgtttatttttttgagatggagtctcactctgttgcccaggctggagtgcagtggtgccatctctgttcactgcaagctctgcctcccggcttcacacctttctcctgcctcagcctcccgaggtagctgggactacaggcgtctaccaccacgtccagctaattttttgtattttttttagccaattttttgtatttttttgtatttttttaaacacagtgaaacgcggggtttcactgttagccaggatggtctcgatctcctgacctcatgatccgcctgccttggcctcccaaagtgctgggattacaggcgtgagccaccgcgcccggctgagaatttttaacggaggccattttgaagctaggagatgtattaatttcttggtttgttttgctttccaaatgctctagtgttgacatccctgcctgcgctggcggtcccacccccgactcccaccaaagcggcacctcccgcgttggtcaatgggctggagctgtcagagccgcggagctggctgtacctagaagagatggtcaactccttgctcaacacagcgcagcagctgaagacgctgtttgagcaagccaagcatgccagcacctaccgagaagctgccacaaaccaggccaagatccacgctgacgcagagcggaaggaggtaaccttggaacaaatgggaagacacgacctgtgccgagtaaccccaggccaccctggtgcctgtgcccagctgcgcaagccccaccttggctcacaaggcccctgccccacctttctggaaaagggagctgtggagagtcatttacaaatgaagcttttcctaaagaaaagtgacagctattgttgttaaggtggttttggtttttgtaaataaggttgctttgtttcagaaagggaaacaattttgtgcgcatcggccgttgtgaatactcaccttttctaggcattattcatcctttgtcttcctgtagtgaaatgtgcttatattttatgaagtttggagaacatcatctattgagtctctgagtatcagcgactggcagggcgaatgctgagccccttcctgggagccgagctccgtccatctgctgtcacaaagccctcccagcttctggcacgttcttcagaaggcggctcctgtgcatggtgggaggctcacagggcgtagtgcccatgttttctgtagcttcctattactgcagcacaagcaaaaggtcacttaggccccttcggcctcttttcatatggagtctctacttcatatgaaccctttacttagattgaagactttgaggtaatataaaggttcaggtgggtgacatgaatagggtagatagaaattactagagccagagtaaactggagagagggtggaggtttctcagctacttctcatagcccaaacccagcagacaggtaccgtgtgtcacagggcacggggacgagaaggtgagagaggagggcgcctgtctgctcagcacagatggggagctctgaaggccacaggaaaggacagggatggattttgttgtagctgctttttcgggtacggtaacgtggactttggtttgtaaacaaaagtcaaattcatatttttcccaccaaatctatgtaagaaacgttttcccccatttcttttctactttctatttttatttttatttgtggaacaggctgtcactctgtcgcccaggctagaatgcagtggcacaatctcggctcactgcaacctttgcctcccgggctccagcgattcttgtgcctcagcctcccaagtagctgggactacaggcacccaccaccacacctggctaattttctgtatttttggtagagacggggttttaccatgttgcccaggctgatctcacactcctgagctcaggtgatccacccgcctcagcctcttaaagtactgggattgcagatgtgagccaccatgcccagcttctactttttatagaagaactttttatttatgtatttattttattatcattatttttttttcagctgctgctttattttactttattttattttttgagacggagtctcgctccatcacccaggctggagtgcagtggcacgatcttggctaactgcaacctccacttcctgggatcaagcaattatcctgcctcagcctcccaagtagctgggactacaggcgcctgctgccatgcctggctaatttttgtatttttagtacagacagggtttcaccatgttggccaggctggtcttaaactcctgacctcaagtgatctacccgcctgagcgtcttaaagtgctgggattatacgtatttatttatttatctatttaaaaaaaatttttttttttgagacggagtcttgctgtgtcgctcaggctggagtgcaatggcacaatctcagctcactgcagcttcctcctcccgggttcaagtgattctcctgcctcagcctccggaatagctgggattacaggcatgtgctaccacacctggctgattttttgtatttttagtagagacggggtttcactatgttagccaggctggtcttgaacccctgacctcaggtgattcacccacctcagtctcccaaagtgctgggattacaggcatgagccaccttgcccggcctatttattttttaatttttaaatttttctgtcattcagtgcacatcaggtacttgttatagattctactagacaagcacataacgaacagtgattatcatcccaggccgtattcaatgttaggggtttgttacggattctactagacaagcacataatgaacggtgattctcaacccaggccgtattcaatgttaggggtttgttacggattctactagacaagcacataatgaacggtgattctcaacccaggtcgtattcgatgttaggggtttgttacggattctactagacaagcacataatgaacagtgattctcaacccaggtcgtattcgatgttaggggtttgttacggattctaccagacaagcacataacaaacagtgattctcatcccaggccgtattctatgttaggggtttgtgtagtttccccaggacctgtagtggtgattgtccagaagccttccataggaggaatgcatggtcattaggtatgccacagctccaaacaccagcaacaccactcaatgactattgaggtaatgacagtgacactgcagctccacatggctggggaggtctcaccatcatggcagatggcaaagcgggaggaaaggcatgtcttaatggtgacaggcgagcagaagagctttttagattcttaattttttaaatgactgatcaatatgtgattagtgttttttgtgtttctttttttttttttttttttttttaagaggtaaggtctcactctgttgcctaggctcatggctcattgtaggctcaaactcctggaaatacgggtgcatgccaccacgcttgcctaatttatttttttattttttattttttgtagagactgggtcttgccgtgttgcccaaggtggtctcaaactcctgggctcaagagatcctcctgcctcagcctcccaaagtgctgagattacaggcgtgagccactggacccagcattaattttctttcaaggaagaaaagtgtttctactcctgaagacaaagataattttaaaatactttttcactgggcacagtggatcacacttgtaatctcagtgctttgagaggctgaggtgggaggatcttttgagcccaggagtttgagaccagcttggacaacatggtgaaaccccgtctctacaaaaaaatataaaaattagctgggtgtggtggtgggcacctgtagtctcagctacttaggaggctgaggcaggagactcacttgaacccaggaggcagaggttgcagtgagctgagatcgggccactgcactccagtctggcgacagagcaagactctgtctcaaaaaacaaaaagtccaggcgcggtggctcacgcctgtaatcccagcactttgggaggccgaggcgggcggatcacgaggtcaggagatcgagaccatcctggctaacatggtgaaaccccatctctactaaaaatacaaaaaattagccgggcgtggtggcgggcgcctgtagtcccagctccttgggaggctgaggcaggagaatggcgtgaacccgggaggtggagattgcagtgagccgagatcgcgccactgcactccagcctgggtgacaaagtgagactctgtctcaaaaaaaaaaaaaaacattagccaggtgtggtgacatgccagtcaagaggctgaaacgtgaggattgcttgagcctaggaggttgatgttgcagtgagccgtgatcacaccactgtactccagcctgggcaacagagtgagacctcgtctcaaaaaaaaaaaaaaaaaacaaaaacaaaaagaaaaaagaaattaaaaaggaaaaaaataaagaaaaagatatatatatattttgagatggtcttgctgtgtcacccaggctagagtgcagtggtgtgatctcggctcactgcagcctccatctcccaggttcaagcgattcttgtgcctcagcttcccagatagctgggattacaggtatgtgcaaccacgcccagctattttttggtattttaggagagaagaggtttcgccatgttggcgaggctggtcttaaactccaggcctcaagtgatctacttgccttggcctcccaaagtgttgggattacaggtgtgagccaccgcacctggccaaaaaaatactttaaaaaaaaaaaaaaaaaagtatacttccaaacaaacagctacttaatgctgaaatttatagaggaaaagaaagtttaaaggcaaaaaaatctataaccctgcacccaaagataatgaccgtgaacacttactgtgtgtccttttggtcttttttggtaattgaggtaaactgtatgtacagcaaagtgcctcaatctccaccataaaatgtagtgagttttgatgaatgcatgaacctggtcatgagaccatttcaatccctgcagaagcaccactcatgtccccttccatcggtcccctgccccatggacagtcactgctctcatttttttttttttcttttctcttttgaggcagcatctcactctgtcactcaggctggagtgcagtggcatgatcttggttcactgcagccttgcgccaccatgcctggctaatttttgtattttttgtaaagatggggtttctttttttttttttttttttttttttgagacagtctcacactgtcacccaggctggagtacactgatgcaatctcggctcactgtagccttcgcctcccaggtttaagtgattctcctgcctcagcctcccgaatagctgggattacaggcacatgccaccatgcccagctaatttttgtgttttaagtagagacgaggtttcaccatgtttgtcaggctggtcttgaactcctgacctcaggtgatcctcctgcctcagcctcccaaagtgctgggattacaggcatgagccaccgcacctggcctcttttttttttgagacaagtttcgctcttgttgcccaggctggaatccaatggcacaatctcggctcgccataacctccacctcccaggttcaagagagtctcctgcttcagcctctcaagtagctgagattacaggcatgcgccaccacgcccagctaattttgtattttcagtagagacagggtttcaccatttaggtcaggctggtcttgagctcctgacctcaggtgatctgcccacctcggcctcccaaagtgctgagatgacaggtgtgaggtactgcacccagttgattttctagatttcctaccacaactgatttctaattcaactccaatatgcttagaaaatatactctgatttcagttcttttaaattgattacgatttatttcggccaggcatggtgactcacacctgtaatcccagcactttgggaggccaaggtcttgaggccaggagtttgagacaagcctggacattgtgagaccctgtctgtacaaaaaaaaaaaaaaaaaaaagggtcgggtgcagtggcttacgcctgtaatcccagcagtttgggaggccgaggcgggcagatcacaaggtcaggaggtcgagaccatcctggctaacacagtaaaaccccgtctctactaaaaatacaaaacattagccaggcatggtggcaggcacctatagtcccagctgctcaggaggctgaggcaggagaatggcatgaatccaggaggcagagcttgcagtgagccgagattgcaccactgcagtccagcctgggctacagagcgagactctgtctaaaaaaaaacaaaaaactttttttttaaagggtttcactttgtcacccaggctggagtacagaggtgtgacctcggctcactgcagcctcaagttcccaggctcaagcaatcctcttgcctcagccccccaagtagctgggactatgggcatgtgccaccatgcttggctaatttttgtatttttcatagagagagggtctcactgtgttgccaggctgatctcaaactcctgagctcaagccatccacccacctcagcttcccaaagtgctgggattacaggcatgaaccactgtgcccggccaaaatgtttccttcattagccggatcactggagcccaggggtagaggttgcagcgagctgtgatcacgccactgtgctccagcctgggcaacagaatgagaccctgtctcaaaaaaacaaaaagatgtgttttatgatcatgtatatacttttcgtggtgaatattgcatatacacttgaaaagagttttattcagtcattggttttcgttttctgtaatgtcattaggtcaaggtggttcatagtgtggtccaaatcttgtttttcttcaacctaaagatgtactttcagcttttcttttcatataggtctgttggccatgaattctctgtttttgtctgtaatgtccctctttcacctttatttttgagggacgtttttgagtgacatggaattctgggttgtcacttacatatatatatttttttgagacagagtctcgctcttgttttccaggctggagtgcagtggcacaatctccgctcactgcaacctccatttcccaggtttaagcaattctcctgcctcagcctcctgagtagctgggactatcggcgtgcgccaccacacccagctaatttttgtatttttggtagagacggggtttcgccatgttgctcaggctggtgttgaactcctgggctcaagtgatccacccgcctgggcctcccaaagtgctgggattacaggcatgagctaacacgccggcctatttatttatttattattttttgagacaaagtctcactctgtcaccaggctggagtgcagtgatgccatctcggttcgctgcaacctccgactccctggttcaagcgattctcctgcctcagcctcctgagtagctggaattacaggcacacaccaccatgcccagctaattttttgtatttttttattagagacagggttttgccatgttggccagaccggtcttgaacacctgaccgacctcaggtgattcacctgcctcggcctcccaaagtgctgggattataggcatgacctacctgggttgtcactttttatcattcaccagtttaaagatgtctttccatcatcttctggccagcctgcctacctgccttccttccttccttccttcctttcctcttttcctccttccctccttccctccctccctccctctctccttccttccttccttcctccctccctccctccatccctcccttccttccttcttttttctttcttttttgagacagggtcactgtctgtcaccgaggctaagaagcagtgttgtggtcacatctcaatgcagccttgagttcctgggctcaggtgatcttcccttagcctccagagtagctaggactaccggcactggccactactcccggccaatttttagctggggtttcaccatgatgcccaggctggccgcaaactccttggctcaagcgatcctcttacctcagccttctgagtagctgggactacacatgtgtaccaccatgcccagctatttttttgtttgttttgtatagatggggtttcactatgtttctcaggctggtcttgaactcctggactcaagcaacccaccttccttggcctcctaaagtactgggattaccagcatgaaccactgctcctggctataactatttctttttttcttttttttttttttttttttttttggagacagagtcttgctctccaggctagagtgcagtgacacgatctcagctcactgcaagctctacctcccaggttcaagcgatctcttgcctcagccttccaagtagatgggactacaagtgtgcaccaccacacctggctaatactttgttgttttgttttgttttgagacggagtcttgctctgtcgcccagggttggagtgcagtggcacgatctcagctcactgcaacctctgcctcccgggttcaagtgattctcctgcctcagcctcccgagtagctgggactacaggtgcatgccaccactcctggctaattttctgtatttttggtagagaggaggtttcaccatgttagccaggatgttcacaatctcctaacctcgtgatctgcccgcctgggattacaggtgtgagccaccgtgcccagcctcaggatctgcttcttttggctactttttcccttcatcatggatcctgttatcccttcttcacacgtccagtacttcctgattgtgtgttggaattttagtttatatactgtttatatggtagagtttatatggtagagactctgaattttgttggattctgttgtcttcccctgaagagtgttgggctttgttctcgcaggctgaattcttatggatcaccctgaagaggatcagtgttgatgctgttagggcaggtctgtctggctttttcttctgcctgacacatccttagtcttggatctgcgaagctgtggttttctggatgttcctgggaagtccgtggtgtttttaagcctctaacttgtgaaggttcaaactccagactttcaggtggtgagcagcagccgcagtctctgctcagtgttctcggtcttcagccgtccatttctgctgagtcttccccacatgctgtgtcatcagctcagggtcaaacaaggacgtggggagcgtttatgtgctggatgggagtgtcctctctctgtgcttgctcctttctagggtttctcccctcattttccagccactttgtcagctctggccagggtgactgcagcctgctaccacggtgtggccgcccatgtctggtggcctggggctgcctccaggagaagccttcctggctccatctccctgctacgtcacctgtccctgctatgtcacctggctgcctctctcccctgctcatttggcagccagagtgtctgatgctgctgcgtcagctgggtccctgccctgaaaggctgggctttgaattttattagtaattttatgtatttctatgagagaaatgtggcatgaaatccctttatccttaaaatcccgtttggtagacagccaagccttttaaaacgttagaaagggcggcccctttctcagctggaagcagctgttgcagtgaacatcccgtgcatctgaaaatgtcaggagttagaagaaatgtcaggaagtgttagaagcgatgtgttccctttctctaaagctgtgtatcggacgtgtcattcataaagccattacttgaatagctgagccaggactcagaggctctgagtgtgacaccctgtcctcctcctctcagtgtgaatagctgagccaggacttagttagagtgaccgagtgtgacaccctgtcctcctcctctcagtgtgaatagctgagccaggacttacttagagtgaccgagtgtgacaccctgtccttctcctctcggtgtgaatagctgagccaggacttacttagagtgaccgagtgtgacaccctgtcctcctcctctcggtgtgaatagctgagccaggactcagagtgaccgagtgtgacgccctgtcctcctcctctcggtgtgaatagctgagccaggactcagagtgaccgagtgtgacgccctgtcctcctcctctcggtgtgaatagctgagccaggactcagagtgaccgagtgtgacgccctgtcctcctcctctcggtgtgaatagctgagccaggactcagagtgaccgagtgtgacgccctgtcctcctcctctcggtgtgaatagctgagccaggactcagagtgaccgagtgtgacgccctgtcctcctcctctcggtgtgaatagctgagccaggactcagagtgaccgagtgtgacgccctgtcctcctcctctcggtgtgaatagctgagccaggactcagagtgaccgagtgtgacgccctgtcctcctcctctcggtgtgaatagctgagccaggactcagagtgaccgagtgtgacgccctgtcctcctcctctcggtgtgaatagctgagccaggactcagagtgaccgagtgtgacgccctgtcctcctcctctcggtgtgaatagctgagccaggactcagagtgaccgagtgtgacgccctgtcctcctcctctcggtgtgaatagctgagccaggactcagagtgaccgagtgtgacgccctgtcctcctcctctcggtgtgaatagctggagtcaggacttagaggctccgaatgtgataccgtttctgtcttcctcctctcagtgccatggcttggggtggatactgcttcacactccttcagggtggcccagacacagtaggtttcattttcctttttttttttcttttctctggtggctacaaaagtgaactttttttcttttttttctttttctttttttcttgagacagagtttcgctcttgttgcccaggctggagtgcaatggcgtgatctcggctcaccgcaacctctgcctcctgggttcaagggattcttctgcctcagcctcctgagtagctgggaatacaggcatgtgccaccacgcctggctaatttttgtatttttagtagagatggggtttcttcatgttggtcaggctggtcttgaactcccagcctcacgtgatccgcccacctcagcctcccaaagagctgggattataggcgggagccatggcactcggccctattttgtccgttttcttgagacatcttaaatgaacatatagcttcaggaagccatggtagcagacaggaccacagtgctttccgtgatgtggccgtctcctagagtccagcagaccggaccttcgcaagaaaaactgctgaggagatggagaaggaaaggccaaaagcctggtattcactccagaggcagtcgctgaggagatggaggaagggtcaaaagcctgatattcacttcagaggcagtcgctgaggagttggaggaggaaaggccaaaagcctgatttatcagtccagaggcagtcgctgaggagatggaggaggaaaggccaaaagcttcgtattcattccacaggcagttgctgaggcgatttgaggaggaaaggccaaaagcctggtattcacaccagaggcagttgctgaggagatggaggaggaaaggccaaaagcctggtattgactccagaggcagtcttttgttgttgttgttgagtctcactctgtcacccaggctggagtgcagtggcagaatctcggctcactgcaacctccgcctcccgggtgcaagcgattgtcctgcttcagtctcccgagtggctggaattacaggcacgcgccaccacgtctggctaatttttgtatttttagttgagatggagtttcgccgttattagccaggctggttttgaactcctgcgttcaggtgatccaccctccttggcctcccaaagtgctgggattacagacgtaagccaccatgctcaactaggttttgtgttttttatagagacagcatcttgttttgttgccgaggctggtcctgaacacgtggtctcaagatattcgcccagtcagcctcccagagtgctgggactctaggcgtgagcccctgcttctggcccccaggccagtagtaaaaagccaaatatcatccctttcagagcatcaggacagcggttgtgctcagggaggctgggaatgggcatcgtgccctctgggggtgcggcagggtcagttggctggaggatattcatggtgctgctgccccctgctgccgtgctgagggctgacatggtgaacagtcatgggcacttgcagacgtggttgtgcccagtgctgtgtgcatgcagccgttccagcaaaggtggtggtcacttggaccattgtggtgccatcatggtacagcacccaggcaggagcaaggccgttgtgttctggtgagatgatggttctgaattagatgtggagatttctttgagatcagctccacaggtatcttacgagggctcgggggtgaggctcagaagtcctacaaggaggggcctcaacctgtgtcccttcacctgcagcaacagcaacgcggagcaacctccaggagcctggggggcgcctgggctgggcgggagtcggaggtcggcgaggggaggaaggtggtcgcatgttggcgtcctcctgccctgtaggaagtactgaatggttccccacaacagtaggatgaaaatgagtttctgttccctgatcccacgccactgcagaatgggaggaaggctttatgccggggtgtccaatcttttctcttccctgggccacactgcaagaagaggaattgggccacacattaaaaatctcataatttttttttgttttatgagacggaatcttgctctgttgcccaggctggagtgcagtggcgcgatctcagctcaccacacacaacctctgcctcccgggatcaagcgattctcttgcttcagcctctcgagtagctgggattacaggtgcgcactactgcgcccagctagtttttgtattttgccatgttggccaggctggtcttgaactcctgacctcaggtgatccgcccacctcggcctctcaaagtgttgggattataggcatgagccaccgcgcccggcccataatgttttaagaaagtttacgaatgtgtgttgggcctcatgcaaagccatcctgggctgcatgcagcccgcgggctgtgggttggacaagcttgctttgtgccattaaattgttatttgtaattagtgctggaaagtcagggtttgagaggcagacactgctgtctctgaatggaaaggtccacgtgtgggaatgaggaagccttgctcatgagcaccctgacagagcacccatgcctccagcagtgggagggcaggcgtgacgctgccgattccacattgtatctggaatgtttgttttggagatggagtttcgctcttgttgcccaggctggagtgcagtggtgcgatctcagctcactgcaacctgtgcctcccaggttcaagcgattcttctgcctcagcctcccgagtagctggggttacaggcgcttgccaccacgcctggctaatttttgtatttttagtagacgcggtatttcaccatgttggccaggctggtgttgaacccctgacctccggtgatccacctgtctcggccttccaaagtgctgggattacaggcatgagcctcggtgcctggccttttatctggaatttaaaaaaaaaaaaaatcaaatgtagcccagctgaagctattaaggggattgttgccagctttaaccatgggaaatctgcattcgtgtgtatgtaatgagctctgcagagattcaacaaggcagaaaagcagatgcccttggctgtcaagggcacagtgtccagtggaagccagccgagtggctgcagggtcttggactcactgccctggccccggcttgttgttggccatgctgccctgagcgcaaaccccattcctctagcctgtccccgtttctagtagctcgctctcaggctttctccagtctccctaacttccttttaaagtgttaaatatagtacagcacagaagggtatgaaagggagaagaatacgtaagttggacagtaacaatgtccttgactcctaggaagctcagaaataggtctgtgctgtgcctggatggtgcctccgtgcctggggatctggaagggtggagacagaccccagagcagccgcttccctgcgggggcctctcccaacaccgtaaggccgcgggtgcctcaagcagcgccgagaggggcttgtgtttcagtgacatttccttgaagtccaggtatggggtttctgtaaatgaaggcttttgcctgccttgttctccagtgtcagcctaacactcacgtgagccaaataggcccggccagacccaagacagctcagtcacctgttccgcatcaaacatcagattccagagccggactggaccaacgtcctgccgtggcccagtgagcgagggttgctggcgtctttgggatactcgggagcagcccgccatccccgtgtccccagggaactcttcagagcaccccccagcagcgtggaagcccccggaaatgcaggcttggagtcccccgagggagccaggggtgttgtggtgggaggggcggccaggtgcccgggacggggtgaggcggcgccggcggggcagcctgggaaaagcacagaggtggctttgcagtcccacttcagggggaccctgcctgacctgggatgaggtgtgtgggctttctggggcaggggcggggacaggttgtaaatctgaatttgtctgatgcttcctcagagatctgtatcatggtcatttcatagaaacggcaaactctgtcccagctcaaaaagatgctattagactaatcctttgatctctttacgtgtgcggctcagctttcagataaacctgcttgatgttttgagggttttctcttatttccgttgcttcctcgagggagagtaatccagtctaatttgcatttctcttacttttaagctgagctgctgcgccctcacgggacacagtcatggggagccctctgccccatggtgggcattggtgaagccacagtggtcccgggggcagacctcaagggtgcacagcagcagccccttgggccctgcctgcccaagccccacctggccccacctgccctgtgttggggactttgtatttcagcctccatgcagggtgacgctgggactccccagcttccggttcacggcttcagggtccagcaggttctcctgaagccccatctaccgctggcttcctgctcactctcccctctcccgctctgtctctccagaggaggccgggcctgtggaattaggcggctgcttcacctgaactcactgcagtgccgggaaaggagcctctggaactagacccaggagcggatctgcaaaggctactcagggttctcccagcggctctgaaccccgaggccaactcgccctccaatcacctggcccctgaagcaggcggaggcccctgtgcacagtgggcctgtggccccatttggttcaggagtgatggtgacacggagttggctccatcgaggctcctggcagcattacatcctctaagaataagtcataaagaaagcactccttgtaagatacacgatccaccaggctgcctccaaccacagcctcatctccatccggggtgtgtctaggttttcttttttattattattttttatcatttgagacatgttctccctctgtcacccaggctggagtgcactggtgtgacctcagctcactgcaacctccacctcccaggctcaagcaatcctcccacctcagcctctctggtagctaagaggtgcatgccaccatgcccagctaattttttttttttttttttttgtagagacagggttttgccatgtcacctaggctggccttaaactcttgggctcaagcgatgctcccgcctcggcctcccaaagtgctgggattacaggtgtagccaccatgcctggccagtatctaggttttcaagttagacttagttttatttgcagaaagaataatgaatacattattaacttattctttgatagttagaaattaataggcattttatatgtgatcttatggtcttactcttggttggctgtttctgaaggagtggctttgttatctgtaatttgtctaatttaaaaatcaattataatgaaaccagcatatgtgattcacaaggcttttttccacctggaccagagtacaccagctattgcattgccaaaagtaggtgtgttcctgttgtgtgatgtgcagatggggggcccctgcagcagggaaggcaggccaggaaaccccttcgcagtctctgctgaggggctggacccgctgcttgggcgggactccccgcagggtgctctgctgcagtctcctcctctgcccgcctgcggcccagagaactctgaatgctaatggcaatgccagctgcttggcagcatgagcttcttggggcgcctgggcaggcctgggcacttctgccctttgtgccatccgcagtcctgtgatttcctgacagtttcctgaaagcgcagaatgggacttgtcgatgtccttggctgcggaaacgcggtgtcttgtcctaaccttctgcaacgcacacacacctcttccgcagtaatgaatggttttttgtttttgtttttgagacagagtctagctctgtcacccaggctggagtgcagtggcgcgttctcggctcactgcaagctccacctcctgggttcatgccattctcctgccttagcctcgcgagtagccgggagtacaggcacccgccaacacgcctggctaatttttttgtatttttagtagagacagggtttcaccgtgttagccaggatggtctcgatctcctgacctcgtgatccgcctgcctcagcctcccaaagtgctgggattacaggcgtgagccaccgtgcccggctaatgaatggttattttaaaaaataaacgtatttcgggataattttaggtttacagaaaagttgcaaagtgagcgcagagggtcccttctgccactccgcagcctcccctctgtaacttcaaagcccacagggcatggctgttgtagctgagaaaccgtcgctgggtgtccctgtgaactccggactttgaatttcactatcaatgtcctgtttctgctctaggaccttgtccccgctgccacctgtgggagacagcctcccgtgcaccatttgcccagcaccctcaggcctgtgacggtctctcagtctttccttgtcttccatgccctgcagttctgagagggcctggccaggcagtttgtccaggtgccccgatccaggcttgtcttgtgctttctcgtgggggtggacgacaggtttcagggaggggtgctgccgcctgtctcaccccactgtggcgtccctgacatccaagtgacattacagacagctctgaccttcctcaccagagtcaggtgtctgtaggtgtctccttggtgacaggactgcttctccctttgcacatttagtcaggcagcaagtccacggccgtgggggggcttctcctagacgggaggatctggaatagcttggacttgtatttatttatttgatcatttgtttgtatccggatgggctcattttatatgtgttttaaactctgagctagaaggcaacactactttcttgtgaagcacaccatctgtccttggccctagggagctcctgccgtcggctcctgggtcccctgatgcacccctttcaacagacttttcattttggggtacgtcctgacttcctggcactgcagggtgctccagcctcctcttgcattccctgccctggcccgggaatcagccccttctccaaggagccccgggtccttttattggcaagtcttaagagagtgaggcctgggtgccaggcagggagccccaggtccttttattgggaagtcttagagagtgaggcctgggtgccaggtgggtgccaggtgggtccggtgctgctgggatgttgtcacgtggaggccctcagctgcagagcagggacgagggtgtcacctgttcagctgcagagcagggatgagggtgtcacctgtgtgtatgaacatctccgcagccacttctgtatctgtgaagagaacatgagttcatgctactgcctctgactctaattcagaccccaaagctccttctaaccttcctagaacgttatttttcagtttaaaaaaaaaaaaaagttttgcaaagggcataccgcgaaaggcccaagtggttgaaagtcccagctgaggctgaagaggcgcctgcgaggcaacaggacaggcttcccgttcagttcaggggtgctgtcctccaggaactatgctggggggcaagtacaggacgtcctggtgtgtggtgcacagggactgctggacacggagacccgtgcccttctcagcgtgggggccgctccccgggacagtgaccacgctcccgccagcctcccaccccacctgacctctgtctgtgaggggctggaccagggtcctgcctggcccggccatccacagagcaacccagaatgttaataaagcctgcagaagctgtgttctccttcgagaagcttctctgtggttacagactttttaagaaatattttgtcggctgggcttggtggctcatgcctgtaatcccagcattttgggaggccaaggcaggcggatcacctgaggtcaggagtttccgagaccagcctggccaacagggcaaaaccccgtctctactaaaaatacaaaaattagccaggcatggtggcaagcgcctataatcccagctacttgagaggctaaggtggaagcattgctcgaatctggaaggtggtggttgcaatgagctgagatcgtgccactgcactccaggctgggcgacagagcgagactccatctcaaaaaaaaaaaaaaagtttgtcatttaaagtagaggcacaggccaggcgcggtggctcatgcctgtaatcccagcactttggggggccgactcaggtggatcatttgaggtcaggagctcgagaccagcctgaccaatatggtgaaaccccatctgtactaaaaatacaaaaaaattagccaggcgtggtggtccgtgcctgtagtcccagctgtggggaggctgaggcacaagaatcacttaaacccaggaggtggaggttgcagtgagccgagattgcgccactacactccagcctgggcgacagagtgagactccatctcaaaaaaataataataataataaataaataaagtagaggcagggggcaacctaaattagcaccaaaattcctcctaatgctcctgttttctgaagtgagtgactgaatgtcggagctctgaatgtcttacaactggaaaaatgttaaagatcacgtttgcgaaggagggaggcaagcatcagaacagaacctcggagcaggtctgcacgcgtgcaggggccgtggggccgcgctggagtcgtttcctgtgctgctctgtgctgctcacagacgctgccactcacccactggccacggcccctcccgcagctgcggatgatctgggcgcatagcgggcgtgcaggtcgcggcgccaaggcctctcctaggcccagtggtcttctccgtctcagagagcattgacggcggagctcacaactgtcaagcaccttagtcatgccgcaaacattaatcattgacagcatgttgacctatgcgctgattaaaaagaaaagctccaataatgtaattccaggagaaagtacacaaacctctggtggcatcttttcaatccaccacagaaaccagctcaggtggggccgtgggggtgttggctggggcaccgccgcagcagtttgggacacatgcctgccacggtgcgcccaggctgatgcccacagccctgctcaggagtgttgggagcggtggactcctgagtttgattttctgtgctggcctggctggagtgaagctccttggagtttggagaaagatttccatgctgatttccctttgtttttgtttgtttgtttgtttgtttgttttggagacagtcttgctctgtcgcccaggctggagtgcaatggtacaatctcggggtttcaccgtgttagccaggatggtctcgatctcctaacttcgtgatccgcccacctcagcctcctaaagtgctgggattacaggcatgagccactgcatccggccctgatttccctttttttttgagatgggagtctcgctctgtcacccaggctggagtgcagtagtgcaatctcggttcactgcaacctccgcctcctgggtgcaagctattctcccacctcagcctcccaggtagctgggattacaggtggccaccaccacacccagctaatttttgtatttttagtagagactgggtttcgcaacgttgcctgtgctgaactcctgacctcaggtgatccacccgcctcggctgcccaaagtcctgggattacaggtatgagccgctgctcccggcccatactggtcttccagtgaatgaatgtagggggcaaactgcactgaggccaggaaagagctgattctggaggtgacaagaacgttctgagcagcactggggcagaggcgcagtcaagagtccaatgggagctgggcgcagtggctcacgcctgtaatcccagcactttgggaggccgaggcaggtggatcacgaggtcagaggttcaagaccagcctgaccaacatggtgaaaccctgtctctactaaaaatacacaaattagctgggcgtggtgtcaggcacctatcatcccagactcaggaggctgagacaggagaattgcttgaacccaggaggcggaagttgcagtgagctgagatcgcaccacggcactccagcctgggcgacagagtgagactccatctcaaaaaaaaaaaaaaaaaaaaagggggtccaatggggggaacttggggcctcctgcctgcacctgcctctgtccccggtgtctcaggggctctccacggccacgtcactgactggcctgttgtgtccttcttgcagcagtcctgcgttaactgcggccgggaggctatgagcgagtgcaccggctgccacaaggtcaactactgctccaccttctgccaacgcaag

SEQ ID NO: 15544 - DNA, 35417 bp, Homo sapiens
aagcgtttcccccgcccggcttcatccctgctggcggcccagcgtcgttctcctcctgcgcgaggcggccaaggcctgctggcccggagccgcgcctccacccgcgcgaggtagggcttcgaggaccggcgcggcgcaggtctccggaggcctcccgagaggggctagggtcgccgggccgcgcgtgggagcgggtggggcccgggaggagacggcgccccggaggggagtgcgaggcctgggccgacggttacgggcgccgaccggcgttgcctggcctgaacgcccggcctttcggtggagggcagcttgcccctgtatgttgcgcccttccgtgggtcagaccggcggcaaggtgaggcggcggcggcagcagcagccgccttgggctcctggacgcgctcccgaggtggggcgggttggggagtggggattggagcgtgatggctggacgtcgccttctcggcgcggcaggtcccgggagacggggggacgaggcgcagtcccgccctcgggagagcggagccaccttcactgagggcgcccggtttggccccggaaaggcaggaagggggcggggaagggatggcgagctcggggtgcaccgcctgtttcttttctggttaggtatcgtccttggagaagatggaagcggagaggcggccggcgccgggctcgccctccgagggcctgtttgcggacgggcacctgatcttgtggacgctgtgctcggtcctgctgccggtgttcatcaccttctggtgtagcctccagcggtcgcgccggcagctgcaccgcagggacatcttccgcaagagcaagcacgggtggcgcgacacggacctgttcagccagcccacctactgctgcgtgtgcgcgcagcacattctgcagggcgccttctgcgactgctgcgggctccgcgtggacgagggctgcctcaggaaggccgacaagcgcttccagtgcaaggagattatgctcaagaatgacaccaaggtcctggacgccatgccccaccactggatccggggcaacgtgcccctgtgcagttactgtatggtttgcaagcagcagtgtggctgtcaacccaagctttgcgattacaggtatggtcttcgtggacactcactgtcccagaatgcgccgtgggaatcaggatttcatagagtggtgtagaggcctgctttaatctctgctgatgacctaaactcattttgaggaaacaagctaataaataaacatccctgagtttgtgcaagcgtggcagctttgcagtagtcatttgctgagacgatgcatccagcctccactcctcagccagcctgcccttttgggtaataaaacttggctcctaacgttaatacagaggtttctaagtggtgcctgcttcatggccactgtatattttagcttttgttcctatcgattatctccttattttaaataaggaaaaatgaaatatggacaaattaacttttcccttcagccgcaaaactgatgggtcacaggttttgtactatgaatgtgcagtgaaaacaagtgtcattccaaggcagcacttttatgtcttttgctaatatagctgttggtaccatagcgaaatatactcaaaaagaacactgaaaggaatattccttttgacgcttggtctttcaggacatgtagaatcttagataagtgaccttgattaagccaagaatattttaatgtcttttatatacacactggacaacacatttttgtccttaaatattgtttgaaaataggtgaagatgtcctttgctgatgttggaaattggtaaaggagaatgctgctttgcaaatgatctattctaactcagttcacagttgagaaaattaaagcccgttaggtccactctggtaaaataggactggcctccaggatttccagctctggactaacacttagcctcctttgagccttaagtctggacatcttcattgtaatgggttttatttctgacaagtagaaaggcgcataaacatgcttaagaaatgaaataggcagtaaataggaagctgctttttaatttttttaattttttttgcagaaattctttcattagcatgaacgctattataatgtcaatacctgtttttaagtcttattttaaataattttacacattatcaaagaggcttaagaataaatgttcaaaataatgtattctagacaactacaaagttttgtaaccatgcatttttatttggtatctttaaaaattaaatgctgtccttctggcatcagtgagagccaagttagcagggactttaaataaatttcataatgaattgagtattgttctatttccttcccttctctggtgtagcctccagcagtctgtgtctgtgcagaattatattaaaaatggtttccataaataaccgtatttcaaatactcttgaacacataatcatgcttctgatcctccacccaaatgatctttctaaaaatgcaaatctgatcaagtccctgctctgcttaaaatcctttaaattgctccccatcgggtaagctgactgttttacagtgtaaacccctaagtgctttttcacagggtacataaggtcctagtactttctggcctctgtccttttagttttatctaccaccacctgcattaaactttatgcaccagcaacactaagcttcttgtaatttccttaaaacgtcaggcattttctgacatttctgcccctttgctcaaagctttcctctcagtattcttctggctagcttctaggcacccttaaagacccatcccatgtccttgtcctttccttcaggaactcttacctgatctactcagcttccctcctcccccagtttttcctttttggtgataacgtaatatcctatatctcagtggttctcaaagtaaggtccctagaccagcagcatcagcatctcttcaaaatctgttagaaatgcaaattctagggttgctagatttagcagataaaaataaaatattgcagaatttggaacataaaaagtttctctgaaattcaaattcaactaggcattgccgtttttttgttttttttttctggcaaccctagcccaaccccagacctactaaatcagaaacttgggctggacatcagcagtcttggttttaacaggccctacaggtccttctaaagatggagaaccactgctatatttacatatctttaaaaacatgcacctccgtctcttaattttgtatcctcccattgagcacactgaatctgtgtgataataaatcttcttttcttcattagtgcatttttacagagtaaccccttaccccatgatagaaattgtctctgtgtaatttaggagatgtttattattcccaagagaagagaccacagtgtcctgaagttgtacatattctacagtgttctgaactgatttatgttggccaataattgtatacaggattacagtctcctgtgaccttctgtaggaatgagatattttggaaggagaaacaaaataaatagctacttagaacctttaaacacagaccagacagtcctctggattttatctagccctgaggagagctccttccctgtctgcatctcattcttagggaagtgagtgaactctgcagacaagttacatttcaaaggacactaatgagagatgatgactgagtttaaagcctgcagaataagtgagaaaggccctttaatttatactcattcgatcattatacttattgagcatctatttttgttctagacactgctagagtctactttgtctgtagattttttctttttgtgtgctcctgtttctacccccaaccactacatcttctttttcttcttcttatctctcctctgactaaaatagggaattaggttatatttttacatattcaatatatttattaaatgaacctttgtttcttgtagtgttctatctcattaagagaaaaagaacttaaagtgctttttaatttattggactttttattcattacatctaccccacgcctcacacacaattactgtgattagtaaaacaaagctgctgactctcagaaggcagttagattggcctcagtgtaactagtctcagctttgatcataaattttgtttctatattctattggtgtgtgtttattcatttcattaattatctgaaacagtgaaagataccaaatcatcttctagagcagaggtgggcaaacttactgtaaagagccaaaagaattttcggctttcccaaccatttcgtctgtcataattacttaactctgccatagttgcagtgcaaaaccagccatggacaatacataaatgaatgagcttacctgtgttccagtaaaacttcattcacaaaatcagatggcagacatatttgcagtttgcagaaccctgttctagtgaatcttataaatgaccatctcaactttatgtataattcagctgcctccttcagcacactaaaaaagagagctattgtgaccaggtaattttttagagaaaacaagccttgttaaaccttttttttttctataaatactactgcacaagaacggcatataaattcatgaggcattccatattttcatatgaaggaactttctagagtaatgttctatatcttgataagggttttagttacgtatgttcatttatcaaaactcaggaagtatatacgtacatttcattgtatgtaaattttacatgaaaaggaaaaaacatcatgaattctaggtagtgataagcctatttgctgatgtattcaggaagtattctgatgtcttcagtttacttggaaatgtactaaaaataagatgaattaatggatagaaatgtgacaaagcaattacagtaagatgttaatggtagaatgtaggtggtaggcatacctgtaaaaaatatttttaagtaaaatattttaaaaagcaagtaaactattcttgcttttagaatatatttgctaaaatattgaagggtgagatctcatactgtctgcagtttactttcaaatgatcaaaaaaatatgaatttatatggaaagagaatattgtgggagaaaatgtcattaagaatcagcgtgaagggtgggcttagggtattcattttgctatccttttgacttctctgaaagtttggaatttttcaaaataaaaagaaaaaagatgataagctgttacccaatgacatgatgctaaagctgaaataccaagacattttagtaatgtcttatcttcccagtgagtttgaaatctaggttgttaaataccaattacaacataggtaaagacaataggattcaggtttgaatatggtatttctaaagaagaatgtaatactgagtaattagtaagcattttattttattttgttttttgagacagggtcttactctatattgcctaggctggaagacggtggcaagattatggcttactgcagccttagcctcccaggttcaagcaatcctcccacctcagccttccaagtagctgggactacagacatgcaccaccatgcctgatattttttttttcttttttgtagagataggagtatcaccatattgcccaggctggtctcaaattcctgggctcaagcaatcctcgcatcttggcctcccaaagtgctgggattgcaggcgtaagccaccatgcctggccctagtaagcattttagctgtacctttatagagcaaaggctcataatagctattatcttggttaaaataatcttttctgggctgagcgcagtggctcatgcctgtaatcccagcactttgggaggccaaggcgggcagagttcgagaccagcctgaccaatatggagaaaccccatctctactaaaagtacaaaattagccgagtgtggtggcgcatgcctgtaatcccagctactcgggaggctgaggcaggagaattgcttgaacccaggaggcggaggttgctgtgagccgagatcgcgccattgcactccagtctgggcaacaagagcgaaactccatctcaaaaaataatagtaataataataatcttttctgaaatttatgagaatttaataaatgataagtgttctgtcacaaattattgggggtagaaaagatggttttatgaatcgtgttaggacaagtgctcttgggggaggggagaaggttaactcttcataatacgccagatttattatgggtagattaatgcagtagtttgttttgttgttgttgttgttgttgttgttttttgagacagtctcactctgtcgctcaggttgcagtgcagtgacatgatctcggctcactgctacctctacctcccaggctcaagtgattcacccgcctcagcctcccgagtagctgggattacaggcatgcaccaccacacctggccaattattttttatattttcaggagagacagggtttcaccatgttactcaggctggtctcaaacttctgacctcaggtgatccgcccgcctggcctcccaaatcctgggattatacgcatgccccactgcgtccagccaatacagaggatggaaaagcccgacacttccatgagattctgaatggaatctatagccccagaaggttaagaagcactgaattaaagatgtaactatgacaactgaactgggaggggggggaataactataggtgaatatctaggagatggtaaaagacttcaaagcataacagcatttaattaggtgcctgtagcctagctactcaggagactgaggcaggatcacttgagcccaggagttcaggccagtgtgagcaacatagtgagacactgtctcttaaaaaaaaatttttggccagactcggtggctcacacctgtaatcccagcactttgggaggccgaggcagactgatgaggtcgggagtttttgagaccagcctgaccgatatggtgaaaccccgtctctactaaaaatacaaaaattagctgggcgtggtagcatgcacctgtagtcccagctgctcaggaggctgaggcaggagaatcacttgaacccagtatgtggaggttgcagtgagccgagattgcaccactgcactccaagcctaggcgacagagtgatactctgtctcaaaaaaaaaaaaaaattttttttaaatgaaacagcatttaagccaactacaaacggaaatacatatctgtatatatatttttaaaaacttaagtagattaaaaagacaattttaaagaacactgaagcatgtttgcaataaatatgccagaaaaaaggttgatattctagttaaataaaattacatgcaattattaaaacctagtgaaagatgaatatggaacatgactgaattcacaaaagggggctgaaaaactcagttttacctactaatcagacttccagattaaaacaataggatacctttttctatcaaattatcaaagaaaaattaagtactaatgagcggtattaataagtgttagttatgatgggcactttcatgcactcgtaacaagcatattggacaaacatccagaaccttgggaaaatgcatgccctttgattcagtaacttctgagattgcaaagaaataatctcattcatttacccatgttatttatattttcaaaaataaactaaatgtcttttttaaaaaacagaaaaggggtcaggttttttttgttttgttttgttttgttttttgagatgaaatctcactctgatgcccaggctggagtgcagcagcaccctttcccgggttcaagtgatcctcccacctcagcctcactagagctgggactacaggcacacgttaccacgccaagctaatttttgttcatttttcttgttttttgggacagggtcagataaattatacgatattgacatgatgtaataatatacattctttacaaaccatgttttaaaaaaattgatatacaaaaaagtttatgatacaatgtagaaaagcattatccagatatatatacatcatacttctaagctgaaaaacaaacgtatacactataaaactgagaataaataagtcaaaaagttaagagtgactctctggatgatttttattttatgcctttttgtatttttaaatttttataagctagtatttaaaataatttttaaaatttatacaagtagttcatgtttatattctggtttttaggatctcaaggaatacatacaaaaaaaacatagcctaaaaacttaatattcttcccattcctcagtcctacttttcttcccagaggaaaccattatgaaataattcagtgggtatcctttctgattgcttttgatggtgatatactattttaaagttatggtagaccaataaataaagatattatacttcagccacataaccagtctattatagtttctcaagttgagtttaaaattaacaaatgtgattatgcaaattatttcagttttctctgtaacagattatgcagagaactcttgcttttagcagtaaataggactcgagtatacagcactaagtacttgacaaatctgaatatccaaaaggaaaaaacagcttaaaatagaaggtcaccagaggacctctgggtgaaagaatgtttatcctcttttcttttttatattcatttaattataaccattcttttctggtggcctgctttatctcttcagtcagatctgccttatctgtgagtggattaaatacttagcaaattaataatagaaacccaggacctttaccagctctgttctctgcttgttttaccaattgggtccaaacatagttgcaaatctgaatgcacatgttcttacgtctatttcaaaagcaagcatatgaattattttcgtattaactgacaaaaagaaatgcacggttgtacttacatttacaggttaagagattttcaagctggaccctcaggaactcttcaagggtccatgtcagtggggcatttaaacagcaaggactttaggcctcatgaacctacatttcagccaaagcacaaatatatataaaactatcattttagatcagcttttgtttatgtggatcatatctattgatatttaccatgtcataaattaaaactgataaattttttaaatatttttaaaataatagttacaaatggtttttatgaaaatttagtgaggagagttacattgttttaaatttttgcacatttctttcacttattattcagctagagtatcatatttgcttctattgtcatagcacatgtcataaagcttctggaaaattccactgtacgcttttgagaggttgagggtgaaataactctttagtgttattattaaaattttaacctcacagatgccctgaatggatcttggggcccacattttaagaaatgctgttaggcggggcacagtggctcactccagcaatcccagcacttatgggaggccgaggtgggtggatcatttgaggtctggaggtcaagaccagcctggtcaacgtagtgaaaccccatctctactaagaatataaaaattacccaggcggtagtagcacgaacttgtaatcccagctacttgggagactaggcagaagaatcacttgatcctgggaggcagaggttgcggtgagctgagatcatgccactgcactccagtctggtggacagagtgagaccctgtctcaaaaaaaaaaaaaaaaagtgctgttagattaaactgccaaatatgttcaaaccttattgctccatttcactgtgcagatagtgcatatattttatttgccaaatgttatggtaagtagtgataaaattatgttttattttttaacaaaaatgattgttttgtgggttatcattgagattatggtttaaaattagttaatgcttgtttcttccttccctcaggtgcatttggtgccagaaaacagtacatgatgagtgcatgaaaaatagtttaaagaatgaaaaatgtgattttggagaattcaaaaacctaatcattccaccaagttatttaacatccattaatcagatgcgtaaagacaaaaaaacagattatgaagtggtaattagagtttatttctctaatatgattgatttttaaaaagctgcttaactcattgtttgagatagttaagacagtatgtaagaagaattggtgccaggaataaaataaacttaaataacagatcaagaccaaggagagaaataaaatgctattatggtaagccataaaatcctacctagttcctagagatgggtcaaaaattttggctcttgagttctttcatgtctaaaaggaaattggaaatgttatattagtggtttccaaatcattgcctgcatctgaatgatttagggagctttttaaaaatacagatttctgagtagtaccttcattgccatatttgatttagtaggtatagggtaagtccaggaattcatctttttttttaaggtcctcagaagattctgatgaacagtcagttttgggattcatgattattgtcagtgaaaagaaaatagattttcctcacacctttttctaaaactatttttctattttgaactttatacagggtccctagagataagtttatgttgcacattaaatgctcccacaaataatggtgaacactaaacctgttaacagtttatagatgtagatatgtgtatgaaattgatgtaacttattgaatctctcagtctttatgtagctcttaaggaaacatcataaaaatttatggatttattttctaattggatataccaaaataattgaactattttattttaaaattgtacctttttcaaattaagattttatgacttacatgccacctttgtcaatattcctgcaagggaagggacattttaaatttttcaaacaatattgttttgacagtttttttaaatgtacaatctcttatttatctgagttcaacctgagatcacaagagagaagaatctctaagtaaaactatagaataacttcattaatggttacatctacaaggagaggggaagaagaaatggttacattttgaaaagtattaatttcatttgactttgagctattagaagtccagattttttaatctgagtaccccattttaaaaaaagaaataaaaccttgcaaaacacaccagaatacatccagtaaaggaaaatcaaggtgaaaggtcagagaaaaaaatcagtgtctattctgtgaatggttgaaagttatagaaagacagattttcaactcagtttaagtccaaactttctaataatttgatgtagcagtgtaatgggctgcattactagtgagttccttatgtgagtgtgcgagcatatgctggatgacttatctagaataatgtagaagagaattaaacattgaatgggagcttaaattagttaatttctgaggttcccttccattcttagaattctttgatttttatattgaattgagagaactagtatagtttttatttcagcaaattatagcaccattgttctcaaggcatggaaaatgtgcttttcatctttaagatactaaaccttttcactcatggcaattttttttagctagcctctaagcttggaaagcagtggaccccattaataatcctggccaactctcgtagtggaactaatatgggagaaggactgttgggagaatttaggatcttgttgaatccagtccaggtaactaaagaaaaaaactttttatattaatgttttcattttccccaaaatgcaatgattattaatgcttcaagtcactaatcacctgatcataggaaagaataataattacaaaaagatcagccatttaaatatgtggataaacaggcactcttgtgggaatataaaatggtacaacctctttagaagacatcttggcagtttcttaaaaagataaatataaatttattatatcttctagcaagtcctctactaggaatctacccaagggaagtgaaaacatatttctcacaaacatttgcatgaaaatgttcacagcagcattattcatgatagctgaaaagcataaacagcccagctgttcatcagctgatgagttgataaacaaaatgtgatgtagccctacaatggaataccatgaaatgacaaaaaggaacaaactactgatacgtatatattacaataaatgaacctcaaaaacatactaagtgaaagaaggcagatacaagggaccttatattgtatgactccacttatgtgacttgtctagaaaaggcaagtctgtagaggtagagaatagattattggttctagggctggaaatggggagtgattgcgaatggacattgagggatcttattgaagcaacaaaaatgttctaaactggatgatggtggtggttgtgcaattcagtgaacttaataaaaattattgacttgttcacttcaaatgggtgaatcttatatgtaaattatacctcagttttaaaaataaaagggatcgttaaaattgaatataattttactttgaaaaattaaccaaaaaacaaaaaaatacaaaaaaattttaaagacaacccattgtgtagcaattagaagtgcaataactttgtccttccaatttgtattttttacactttcaatattatacagtttaagaaaattataaaaaatacagagaaaatcatttgcaatttctccatacaaatacatcagttctcttttttcttgttctttccattaattatctatgcatttactttacatattaacagtactataacaataatctagatacaaatttgcattctgatttttttaattttaatggtataaatatttttccttgtttcaacatagtcctcatagttacatatttaatgactaaaataattgaatggaaatagcattatttatccagtctctactgttgaaaggtaacactgtctctatgattgtactataaataatgccacagtgaatatttttatacatatttttaggcatttttgtctttcgaaatatttttctagggtcgttgacagaattatggataatcaaagttacttgcatttttatgtcattttctatgtattgcaaaattgctttccagaaatttgtgctaagttgcactggtgatttttttttaagccagtataagatatgaaacactaattaaaggtgaacttagcacattgtggtttatgtgaacaagaaggaggcaatgtggtatagtagataaactataacttttttttttttttgagacagagtcttgctttgttgccgaagctggagtgcaggggcatgatcttggctcactgtaacctctgcctcccaggttcaagtgattctcctacctcagcctcccgagtagctaggatcacaagcacacaacaccacactggctaatttttgtatttttagtaaagacaggatttcaccatgttggccaggctggtctcgaactcctgacgtcaagtgatccacccgccttggcctcccaaagtgctgggattataggcatgagttaccacacctagccttgtatttcagcacttaattacctggacaatcacaggcaagtgatttaaccttcctgcacctcagtttccagcccaatagaatgaggctaactcttgctttgtaaagtcagtgtggggatgagctacaatgaatataaagagtctggcagggtgcctggcatattgttaaatacatagtagccagtaatgttatttaactgtatctctactcatctagagggaaatcatcattacagatgaaggaaaatgttggataaaaataatttgtctttttcttttgtttctaggtttttgatgtaactaaaactcctcctatcaaagccctacaactctgtactcttctcccatattattcagctcgagtacttgtttgtggaggggatgggactgtagggtgggtcctggatgcagttgatgacatgaagattaaggtattagtctttaagaactactacagaaggacttctaagataaatatactatacatatatatatatatatgggttttgttgttgttttgttgttgttgttgttttttcttgagatacagtctcgcactgtcacccaggctggagtgcagcggcgcagacacagctaactgcaacctccatttctcaggttcaagccatcctcccacctcagcctacaaagttgctgagactataggtgtgcgctaccatgcctggctaatttttgtattttttgtagagacagggtttcaccatgttgcctgggctgctgtcaaactcctgggctcaagcgatcctcccaccttggcctcccaaagtgctgggattacatgggtgagccactatgcccaacctaatatagaatatttttgctttatattttttattatgcagatgaatattagacattgccagcttcaaatagttaaaaatgagatgttttgattaagcaattagcacaagctttagcaaaacaacatacagttgttatatttgtatccttactgttttggtcttattaaattttacaaaatattattacccagcaaatagtctgagagaaaaatctaaaacatatcttccatattctagggacaagaaaagtacattccacaagttgcagttttgcctctgggaacaggcaacgatctatccaatacattgggttggggtacaggttatgctggagaaattccagttgcgcaggttttgcgaaatgtaatggaagcagatggaattaaactagatcggtaagttacgtttccccaaaaagtagatttcttgagatttagccataattggttaacaagtgaagacttgtgtagatgaaatgtgccatgtaatttaaatgtgaaagactatactagttgtacctacacagatactggtgttttgttttattatgtaagagccgaagtaataagttacactgagtacttatccctaaatttgcatgctcatatacgtgtggttacttttgtagatggtattttaatagaaaaccctcatttatccaaacatccagagtatggggtttattgtaaaacgtgctgttttttttaacttctgttttttagatggaaagttcaagtaacaaataaaggatactacaacttaagaaaacccaaggtatgttgttagtgcctcagttgcaagtggtttcagcttcattgcacaagatacggcactctgtggtgggatacagagacctggtgcttatctcaagggagctggctgtggagcagaacagaagcttatatgcttacctcacaagctggactgtaaatgtgttatgggagagaacagggtgcaggtatgcttagttctgccctagctgagaagattcagaggaagtggtacgggagttggtccttaaaaaagcaaaggactttccaggcagagggaaaagaggtgagagagtgcaaagcatggttagcaagtagcaaataatacagagagagtagatctgtatttttaaaagatactctggagataatgtgaaaatagctcagaagcctgcactaggtagaatcaggatgaggacaatgcaaagacattttagaggtagaattaatcaatacttgacaactgattagtataaaggggagagagaaaatacatattactattagatttctggtttttataactgaatatatggaaatgactataagaaaaataccaagtttcaggtttgggtaggaagaaaatgagatagatattgggcatatcaatctaaaagttttcgtagtgttaaacaagaagttggacgtttaggcttattgctcaggaataaagacagagctagagatgcagattgaggaatctagactgggttaggaagtaaaataaactggggagggggcagggggagtagcccaagttgtgggattcacatccctatttatcagcctttgaactgaagccttatttctgataattgtttaaatgctgagaatgcataagagaatgtggggagtgagaggggaaaagagggccaagaactacatcttttctttttttttttttcttttgttgtggagacaaggtctcagtctatcactcaagctggagtacggtattgtgatgacagctcactgcagcctcgacctctgggcccaagcgatcctcccacctcagcctccgaagtagctgggaccactggcatgtgccaccatgcccagatagtttttgtttttgtttctgttttgtagagagagggtctccctatattgtccaggctggtctcgaactcctaggctcaagcaatcctcccacctcagccttccaaagtgttgggattacaggcatgagtcactgtgcccagccatgaactacatcttgcaaatagatatatttaggtgacacagattaagagaggccactaaaggagactaaagagtgtagtaagtaaataaggagaaaacagagaaagagaattacagtaggtgggtgataaacagcaaaattaaagcagactttaaagaagagcatttggggaacactgatgcatgtttctctgcttctccatctccttgccactgaaatccctctaaaatgtgcctctaaaagatcttgtataggtctttgagaaggcacaaaaccttaaggagaaagagatcacagcagtcttcagaagccaaaactaggaaggttcgcatattgaaaaaagctcaaaagtgcctacactgcagaaaaccaagaaagaaaccagtttattgagcagaaccaagcaaaggcttaggaattctatgcttacctcacaagctagactataaatgtgttatgggagagaacagggtgcaggtgtgcttagttctgccctagctgagaagattcagaggaagtgatacgggagttggtccttaaaaaaagcaaaggactttccaggcagagggaaaagagatgagagagtgcaaagcatggttagcaagtagcaaataatacagagagagtagatctgtatttttaaaagatactctggagataatgtgaaaatagcttagaagcctgcactaggtagaggcttctaccacatcactcagagagcagtagtatagagtcaccacatcactcagagagcagtagtatagagtggttctgaaaatagaaggagtgagcgaaagaagctgtttgtcccctagatcacttcccctttccccaacttcacatggtcatttactaccctcctcaactcaggtagtagattggaggtttactccggaaagtttagagactctagccagctaacgccatactgaaaacagatttagtgcaaagtgagatcactggcccttttcatccactcaacttcaagaatagtggcagagaggatttctctctggggaagctaacttgcccaagataaaaattaacacgtaccaatatttgagtgtcccgtagcaaaaggaccagatttttgcactgtagtcctataatgaagcttataccctagcaagagctgcttttggatgcaaagttcacagtttgccttttatgccttactcttaaaacatgaatatatacagccaaggattggaggcacaaacaaacatttaaggaaagcctctgccatgagagagccccaaagaaacaacaagaaagaattgtaggaaacacagtccaggaagctgaaggaagtcagggagtgggactaatgttctcagagaaaaatgaaaatattaatagaacagggttctataaaaggaacattcagaaacacatacctcaaaaaaggctcttataaactaaaattcggtatcagattggaaagtacaattgaagacaccactcagaaaatacaacaaaaagcaaaggaactggacatgggggcacacacctgtagttccagcaactcaggaggctgaggcaggaagattgcttgagcccaagagttcaaggctgcggtgagctatcatcacgccactgcactccagcctgggtgacagagtgcagataagaccccatctctaaaaaaagagaaaaagaatacagtaagtaacatttaaaatttaaaaatcacaaattggcggggtgcggtggctcacgcctgtaatcccagcactctgggaggctgaggcaggtggatcacctgaggtcaggtgttcgagaccagtctggccaacatggtgaaaccccatctctaataaaaatacaaaaattagccgggtgtggtcgtgggtgcctgtaatcccagctactcgggaggctgaggcaggagaattgcttgaacccgagaggcagagggtgcagtgagccaagatcacgccactgtactctaccctgggcgacagagcaagactctgtctcaaaaaaaaaaaaatcaagaagtaatgatctgattatgttatttagaaatatagagataaataccagaagaaactacggaaagagctctgggagcaggaattataaatgaggaggagtagacagaaaactgcagtgtttcctttgaagccttgtagaactatatagcttattaaagtggattgctttgatttattttaaaaaaaaaattgaacgtaaaaaaatagagaaagtattgagagatcctttaaaatggttcctgtgcttaaaagtatttgtcagttatcatagtgcctgaaatgccaacattaaagatgtatttctctttttgatagtagccaatctaataggtgtgaggtgatatagctcattgtggttttcatttgcaattctctgatgattagaaatgttgagcattttttcatatgcaggttgaatatcccttatccaaaaaaatgggaccagaagtatttcagatttctgatttttttggattttggaatatgtgcagaatatgtaccccttgagcatttctaatctgaaaagctgaaatccaaaatgctcccatgagcatttcctctgagtgtcatgtcagtgttcaaaaagtttgagatttggggacatttcagatttcagatgttcatattagggatgctgaacctgtgtctgttggccatttttatgtcttttgagaaatgtctcttcaagtcctttgcccattttttaataagattattggttgttattgagtaacttcagttccttctacattttggagattagttccttatcgagtgtataatttacagagattttctcccaagctgtgggttgcctcttcactctattgttttcctttgctgtgtagaatctttttagtgtgatgcaatcccttttgtctatttttacttttattgcctatgcttttgagatcatatcaaacaaatatcaaacaaataactgcccaggccaatgtcatgaagctttttccttacattttcctttagtacttttatagtttcaggttgtacatttaagtctttaatccattttgaattgattctttataatgggtgaaataagggttgattttcattgttctgcatgtggatatccagctttcccagtaccatttattgatgagactctcctttccctattgtatgttcttggcacctttgtcagaaatcagttggccatagatatgtgtatttatttggggcttttctatcctatttcattggtgagtaataacaaatgttggcaaggatgtggaaaagagagaatccttatacactattggcattgcaaattagtacaaccattttgggaaacaatatggaggtttctcaaaaaactaaaactagaattaccatatgttccagcaatcccatttatagatatatacccaaaggaattgaaatcagtatatcaaacagatgtccatgctgccatgttcattgcagcattatgtacaatagccaagatgcagaaataacctaagtgcccatcagtgaatgaatggtttttttaagtatgccatatatacacaatggaaaactattcagactttaaaaaaaaaaaaaaacaggaaaatctgtcattctcggcaacatagctgaacctagaggacattatgttaaataaataaaccagtcacagacaaatattgtatgatgtcacttatatgtggaatctaaaaaatcaaactcaaagtcgagagtagaataatggttaccagaggctgtagagagtagtagagtagatggagaaaggggagacattggttaataggtacaaagttttagttaggaagaataagttctgctattgcacagcttggtgactatagttaataataatgcatattttcaaattgctaaaagagaggttttttgtttttgttttttgttttttttgtgtttttttgagacggggtctcatttgaccatgcagtggcgtgatcacggctcactgcagcctagacctctagggctcaagtgatcttcacaccttagcctcattagtaactgggactacaggcacatgccaccacacccagccaattttatttttattattttcaatagagacaagatttttctgtgttgcccgggctggtctcaaactcctgggctcaagcagtccacgcccctcagcctcccaaagtgctgggattacaaatgtgaaccactgtgctcagcctaaaagagaggattttagatgttctcaccacaaataaatgataaacatttgaggtgatggatatgcaaaaaaaaatgatgtatttctcattcataccaggatgtattactattcagtaataaagcagagctgagtatttaaaaatatttatcttatcagagatcattcctccaaagaaagatggacaaagtttcacaccagttagatgattcaaataagaagacatgttcttcagccatttgctgtcaagaaataagatatgtcattaaaaataaatatactacaatcaagtagggtctgcttacctctatagaagaacatccaaacaatcaaataaaagaaggaacttcatttctctatacattcaagcaagtgttttgtgcccatctggtgccaggcactgtcgtaggtgctggagtttcagtgatgaaggccttgtccttatgaagcttatattgccccactcttagtttctgaataaaggacacctaggaaactagaaaaaaaaaattcagttaaaaaataaaggcaaattaatgtacattgacatattttatttaaaataaggtgtttatgggttttttttttaaagaacaactaggattgaaaattatattttggcagtgaagggacagacatttagttccataagagatgaacgggaaaagcatgaaaagaacaagtgaccaaatttagacttaaccatcaaaaggaggaagagcgtctttgatttggaggagaaaggtgcacttgagtaaagtcagagtttttagatggcagaaagagagcatgagaattcatacctttcatacctgaggatctcacttttttcagtgaggcaagaatcaagatcatctgaacataacaaaggcaggagagctggttatcagggacttgaagagaggtaaattttgaattaaaccactagggaatacaggaaaggagtcatctaaagggttactgtgtcctattagcgattgtgtccagccatccttagaaataactttgtaacaggatcataattataagattcttaccagcagtgtccagcaacctggaaatagagcagagaaaacagtttggtttagagaagattagcaagtaaggctggccgggcgcggtggctcacgcctgtaatcgcagcactttgggaggcagaggcaggcgaatcacgaggtcaggagctcgagaccagcctggccaacatggtgaaaccccatctctactaaaaatacaaaaatattagccgagcatggtggcgggcgcctgtaatcccagctactcaggaggctgaggcaggagaattgcttgaacccgggaggcagaggttgcagagagccgagatcgcgccactgcattccagccagggcgacagtccgagactccatctcaaaaaaaaaaaaaaaaggctaaattgagaagaggtcaagggtgtgttggaacgaaggatggtgttgagtacagtcattgaaatgattgaccttggaatccaggccgcactgggaagtaagataaattaaggtgagaccagtagcctgggttgggactaatagaagctgagagcttggaggctgtgataaatgtaaagagcaaatgtaatgggaacacaggcatgaaaagcctggaagcatcaagtagagccattctagatggtaaggtctgaggtgtagcatataaaacagaaatggaagatgagattcacatctgtagttatcagccttaaatggaagctttatttctggtaacttcactggacagtataaaatagccatgtgaaaagtaaatgcagaaagcatctccattgtcaaaagaacacaaagactaagattgacatttaattatgactcaagcttaggtggaaccatagtctgttgcttattcttaccctttctcacaggaattcacaatgaacaactatttttctgttggacctgatgctctcatggctctcaattttcatgctcatcgtgagaaggcaccatctctgttttctagcagaattcttaataaggtgtgttggataaaataacatttcctgcttatcaccgaaggtacagtaaaaatcaatagttcaattatatttagcactcctagattcagatttaactaacttacagaaatatttacctgctctgttttgtgtagggttgtcaaattagatcttttttttttttaattagatctttaaatgtgctttatcaggccaggcacagtggctcatgcctgtaatcctagcacttttgggaggcggaggcaggtggatcacttgaggtcaggagttcaagaccagcctggccaacatggtgaaaccctgtctctactaaaaatacaaatttagccgggcatggtggcaggtgtctgtaatcccagccactcgggaggctgaggtaggagaatctcttgaaaccaggaggcaaaagttgcagtgagccgagatcataccactgcactccaacttgggcaacagaatgaaactccatctcaaaaaacaaaacaaaacaactttatcaaagtattatataactctaacaaattttttaaattcaaatttgggatgttttataggatattttgcttagatggcaactaaatggaatatatgatagtttatcttaaatggcagctaaaattggaaggaaattttaggcagaataaatttttggtgaagtcattaatggaaaagtagatttcattggtttgaaaaacctccaaaaggcagatgagataaaagagcagcctgtttgccacagctttgaactaaggtcatctctggtttctagtatagttgattccgttgatggaattttgcttaggaatttttttaataacgttcggtgattgaccaacaggatatcaaaaataaatgcctagcaattatattcctggttctgttttacaaatatttcaaattttgaaatagttcccttttattaatatagttactaaggtaatacgtattactatttatacaattgataattaactcagtccttacatcaacctttttgtattcataagtgattagaaaatgtttgttagattaatacgcattactattcctaagtaatctgaagtactaggaaaaagtggaattttctaattcgaatatttttctttataaaatacaacttttttgataaattgggagaaaacaccatttagaaaaaaatcacttctaggccgcgcatggtggctcacgcctgtaatcccagcactttgagaggccaaggtgggtagatcacgaggtcaggagatggagaccatcctggccaacatggtgaaaccccatctctactaaaaatacaaaaattagccggatgtggtggtgcacgcctgtagtcccagctacttgagagactgagtcaggagaatcacttgaacccaggaggcggaggttgcagtgggccgagatcgcgcagctgcactccagcctggtgacagagcgagactccatctcaaaaaaaaaaaaaaaaaagaaaaagaaaaaatcacttctatcccacatttcccctgagaaagaggataattaaacttaaatggaatggcctgtattgtcatcttccaaaaaagaaggatgagtaatatttcatctactgtaccacagttcacctagaacttttaaactattaatagcctaagagaataaaatgtaaaatacaaatgatgccaaaagtatctgtaatatgttaaaggcatttttatttttacattgtgttttgattatagatttccattgctgctcctagtggattccaattttaccctttaaaattactagaatggaggtgttggatagggccagaggttgcacaccaaaagtatcccctttggttgcccttcttttcatcagcatctagtctaccataaggagaatgtgtgcttcaacattcttaaagggagctttgatacagcgtattttttcttattgtttacagggttagattgttttaatattatattttctgtccatttttcataggcggtttacttattctatggaaccaaagattgtttagtgcaagaatgtaaagatttgaataaaaaagttgaggtaagctattaacactttttattttttaaagttttaggtggtctctggattatgaagactttttaaacagaaatgctaaactttgttaatatattttgccagcatacatagagtatttatttgtgtgccaggcactttgctacatgctttatacacattgtccctctaaattctctccacaattctataaggtatgtattatatattcacattatgcagaaaagaaaactattttaaatgaagtaatttgcccaaattctctcatttaatgcctaaatgcacatgtaatcaagatgtgaacccagatttatgtaaatccagtctgtttaactattagggtgagtggcctccattcatacatgataaataatttacagttatctaatacagtgcctgactcaacataaagacacagaggaagtttaaatggaaagtttaattcagattatttttgtcgggtatctctcttacataccaaaataaaaatgtataaatacaaaaaaaaaaaaattagccaggcgtggtggcgggcgcctgtagtcccagctacttggaaggctgaggcaggagaatggcgtggacccgggaggcggagcttgcagtgagccaagatcgcgacgctgcattccagcctgggggacagagcaagactccgtctcaaaaaaaactaataaaaaataataaaaatgtataaatagtaaaaatagaatattaatgattgcttattgcaacagcatctctgacatcatgatatggcagtctttttttttttgagatggagtctcactctgtcatccaggctggagtgcagtggtgcgatctccgctcactgcaagctctgtctccctggttcacaccattctcctgcctcatcctcctaagcagctgggattacaggcgcccaccactacgcccggctaattttttgtatttttagtagagacggggtttcacgtgttagccaggatggtctcgatctcctgacctcgtgatctgcccgactcagcctcccaaagtgctgggattacaggcgtaagccaccgcgcccagccagatatggcagtcttatatgtattccttgcttgattccaaaaagaatctgtaatggttaatagcaacaacagagacattaattcagagaaacctagaactgataaaataaataaaaagagatcataaacagtttgggaaaagagacaatgagcagggagtaaggagactgattatacattagtcaaggaaaaatgttgccgttaggcgtaatgtttagctcaaagtctctgggctgccatggcgtagaagtaagcaagattttctgttaaaaagagtgttatgttactttatcatattttatttttcctaggctttgatggtagagtaaagcatacaagcatataaaataaagacttttattttattgtctgacattttatttatataaaaatacaaattatttttaattatacagaaataaaataaattttatttatatacctacaaaatagtcattgtcctcgatactggaggtagacagtgataaatcccttgctctacatttacagtctagggtgaagaaagatatttaagccagtctgggcacagtggctcatgcctgtaatcccagcactttgggaggccaaggtgggaggattgcttgaggcaaggagactagcctgggcaacatagtgagactccacttttataaaaaataaaaatagctgagcatagtggcatgtacctgtggtcctagctgctcaggaggctgagggaggcagatcacttgaacccagcaggcagaggctacagtaagccatgattgtaccactgcacaccagtctgggtgacagattgagaccctgtctccaagaagaaaccaaaaagatatttaaatcacattgcaatgcagtatgagaagttatataagaaaagcatgtggtcttacaggaataaataactgcaatacgtaacctaggagctacagagactagggaaagtggcagtataagcaagtctttctggaagaagtgacaagctggaatctgaaaataagtaagagttagctaagagaaggaggaggggaagattgctgtaggctaaaaacagcatctgcaaaagacccagaggcatacatggcatatttgagtgagttcaggctggagcatagctttcaggaaggaaagacaagcgctgaggctagagagatggacagaagtcaaatcacagagtgtcatatttgcctggtattggatcttgtatttcatcatgggcattgaagggttaaagtgaagccactgaagggtggtaattagaggatgacatatttgcattttttaagtgtcgatccaaccgctctgtgagggatgcataagaaagtaaagctagaggcagataggccagatagaaacattttagggaagaaatggtgaagagagagaaagacatagaaatagcatcaacagtttttagtgattaaggggatgtggagggtaaaaagtcaaagaaatcaaagataactgccaggtttctggcttaaacacctgggttgggggtgagttaacctacttaaccaggaaagagtaagtaagagttagctaagagaaggaggaggggaagatgttactctttcctggtaagtacattggggaacagggagcaaattgcagaaaagttgcttgatcaattttttacataagagtttttggtgccagtccatggacatgttttatgggcagtggatagatggatctggcccagtttactttcctgagaaggaacatccagggaagtagagtctgtggttcccaggaagcaaagggaaagaagattttaggaaaagaggaagggggtcagcaagtgtcaggtgctactgaaacagcaagttaggtaagtcctgaaaaaatcacgaggctcaacaaaaagaacattattgttgatgttgatagaagcagttctactgaagagatagaaaagggcagatgagaggccctgagtgagaggtagggagcatcttctacatgtgcatctctcatatataagcacatttatgaaaatagatgtgaattctaaatggatgtgtgtggaaattgtgtatcctgtagtcactatctatttgtatttctttaaagctagaactggatggtgagcgagtagcactgcccagcttggaaggtattatagttctgaacatcggatactggggcggtggctgcagactatgggaagggatgggggacgagacttaccctctagccaggtatgtacatttgtggtctgtttttttatgtcactattttatttaaagcaatctcttgtttatagactttaacatttttcctcaaattttcttttttgtgtatctcattagttataaatattttttaagttgatggtccaactgtgttaaaaagtaattgctctagcataactgattttttattgcatcatataatccatattttctttttccaattttaggcatgacgatggtctgctggaagtcgttggagtatatgggtctttccactgtgctcagattcaagtaaaactggctaatccttttcgaataggacaggcacatacagtgagggtaggtgaaatatagctgtaacaggctaatttgtcccaatccaattctaagctgttgatatgtaaaatatacatgctatacttttctttaaacagtggtttatggctcatgcagctggtcactgtacactagcggctagagtgggatgaggaagaaacagaaacatggctcaagatccatgagataaaacgttcacttgaaaaaagaattccttaatcaatgaataaaaacatattcagattaatattttctaaaaatgaaatgcataagggttaagggattgtggatggtattattaaggaagacctttctaaatttggggggactgacttttaaacattatttgttccctaatatcagctgattttgaagtgctccatgatgccaatgcaggtggatggggagccttgggcccaagggccctgcactgtcaccataactcacaagacacatgcaatgatgttatatttctctggagaacaaacagatgatgacatctctagtacttcggatcaagaagatataaaggcgactgaatagatggatgagggagtgaaaactttgcatagaatcctcacgcaagtagatacatgttcatccaaaagtattaatagaaattctctatcagctattcagtcttaatttcactagtagtataatgggtatacatttttgtaaatagcatccccaaaccagccagccttcagttatttacaaatgtttgttcttttttcagcaaaatacttcaaatgaatagtattaacttacaaaaagtcacaaaaacttacatgagagtgaaaatttgttatgactgttttgagagtgggactcactctgaagtatgtgctgtctcatgtcttatttttgaaccatgcatatgatggacacacaatggatggacacattatatctccaacaaggtgtgggtggaaagatcaaattaacctgcttttttgaaaggaaatgattactgtcaaaccagcatggttaattgtgagcatcctcctgcagcatgccccttaagattttctacaacccaaaccaagtgtatgtattgatttctaggaacccccaaaaggagaatagtaaaaaaagatcatacttaaaatttgtattacaatttttattttaggaacttattcagacacgtaaatgttgtttaattctgtaggtaaccatttgagctgcaattcaggatcttttttataacaccagtgtagccaaaagagaaacagataagtgaattggtaagaaataagattcagagcacttgggattgtaagttataggttctgagctgaactgtttatcagccgctctttttattaaaagacagtgtcaacacttcaaaaaacgtgcttaaaggagacaacggtgagattaattgcttagaaaaagctcaaggctgactgataagttttaaaaatttggtggtcttgtagtattttgaaatacagtagtcttttaacagaatttccccttagggaggtaagtggacagaaatctttgctaaaatgtttatatcatatttattttaaaatgagagagatatatttttaaattatttattatttaccttgtggtatggtacctgtgtttagtgtttacgttctgtagctttatttaataagttaaattgatcacataaattctgctagtcacaatcagatagaaatttagtctattaattaaaattctaatttaattctcctgacagaaatctagatattcttattcttcacaaatattcctcattgtattgaaaaatgaaggagggcatgaaaagcactagggaactacttttggataactgaaagctttgtttcattgttttatttgcccctcaattgccacaaacttactgaagggctagtttcatggttcccattagagggtgcttgttcgctgctgttgaccagcccaagggtcgtgacccacaggtcggctgacccagagggcatccagcctggtgtttttctgacacatggcccaggctttgtggtctttcatgacattaatctctgaaagatcagaatgtatcccccaaaataccattagctatctttgagggtctattatgaatctgtcatccatgaattgccataaacctaagtttgcctcacctcaggcccagaccatgttttcaaagagcaacttagtaatgtatacagtagtcagtacattttatgaaatactctattttgctaaattaacctcttgcagatctcctcaggtgatcttaaattctagtcttgagaaactttgtgagcagatctgttttcagcttctttatatacctttcatggtaagtaaccatggcagtgaggatggcagagttttgttttttttttttttaatgggccaatcatgttctgagtattatgaagtttatcctttcattcatgatcaaaattgttaaagacatcacattttataaatacactgttaaatccactttgctgtaggttatagtttacctgttatataattcgtagtgctaattgtagtagaagcaaatcaatttaggatgttggaacgaaaataatcacaataactaatacagctttttaattgtgaaaactacaattaaaaattataattttaataccaaccataatattacactgtatttagaacaggcttatgtaaaatgccctcatttatctaaataagttgattttttggttattgtaatctagtaaggtttttgcatcactactggtctgtcatgaagtttttctgctggcttattcacttatttagacttcatttagggaagctatttcagaataccatctcataaaatgtatcattatcttgtttttgcaaaattcacttactttttgggcacatttacccagcatttcaaataagtgtataggcatgtgccttgtttaagtacaatttataagacttcatgtttgcaagttacatattagggtagtgattgtttatattaccagggattctacactttaccaaaaaaaattgccataagattttcctgttccattttaaattgtcttgatatttaaaaaaataacttctacattctcaggaagaaatacatgaagtaaatcatatctccatgtctgtttccagatttctctaatctttttactatcccaatacattcctaattcctataaacgtagtggcttaaatactgaatacctggcagctcttaaagatcccttaggcagatgatgataattttcagtgtttcgtcatgtttaatagaaatcaaactgacttgtgttttaaaatacaagttgtctgctagtaaagttacatgatttaggtgtgttttaggttttctgcaacaattagctgtgaacccctaatgtagctaagtttatacaaattttataatcaaaattatttatttttatttttttagagtatgtcaaaaacatatagtgtttgctttgtgaaatacatttgcttagagttataaaatatactgtgactcagaaattgtaaagtcagtttgcgttgtaaaaatgaatactaccagcatgtcaaaagaaaaataatttacatttgtaatataaagtaaaattgtatttaatatatttattgaattttaaatttgcactaacttgaaaactttaaaggttatactaatttaatgattaatgtggacccaaatacataatttggccaaaaaagtcattagaatgggtaatggttttgtgtggttttccttcaaaatgataatattgaagcaagaaccagcattttatattgataatttttttaatatttctacccagttgaggacagtggaatataagtagatatatttaaaatatctagatatttaaaaagaaagaaaaggttgtttatcccaatctgaattcattctcagcaacaagacagaaaaggtggtttgggttttgcttttaaacagtgtccccctgtctttttcaatttttcccttgaagcctttctcttgttcttcagagtacgcgctgcaggctatctgcagcatcagaatgcctgggcaggctgttgaaagtatggattcctgagcccaacccttaacttaatgattccctgtctctggagatgcaacatagaaatctctgtttttattaacaagcgcctcaggcgattcttaagcatactgaaatttgaaagcttctggtctgaacctcatgtattcacctagggcttttgctaggtgggataccatgccgaaaaattgaattaattgtatgttcttaaaattgtttttcttctactccgctgtcctcttccctcaaaatcacttttctaaaagaactctatgaaaaacttatttgtatcatacccaaattgatatatttgtctgaactctgttacataaaaattggtatgattcatatgtggaatcagtttttggactgtgacccatgcagtgttgggggacaaggagttgcttcaggagttagtgcagtgcgcctccaaggggcagtgagccatggaggcgcctgccttctcactgcagtcaatgcagccacacttgtgtatactgagtgctgcttcagatctcagtagataaaataattccacatttaaaatgattctgctattttttataaagggtttgaaagccactactataatgactttgtcacctaattgattttctactaatttttacatattcagaaacttcgtgtttttttggtggacagaatattttggaggtctccgtcgctgtttagaatgtggccacttggctgtttcacagtttttaaagctattttattgaatagtaaagcagtgaacttagcctttgttctttgtgtttctaatttaagcatatagtctatttaatttttgatatgtaaatacacatcaatacatatatatttacccatgtggccctgtgtagtcagtgcatgaggcttgcatagcccagaaaggtacattccagggttctggggaaagaattttaaaatgccatcctctaatacagacgtttataaaacttaaatgaaatgattgggcttaaccatatgcaagaaagtctgcagaaaataaatcacctagaaactataaatagaaatgtgctgctgaggctgggcacggtggctcacacctgtaatcccagcacttggggggctaagggaggcgtatcacctgaggtcaggagtttgagacaagcctggtcaacatggtgaaacgccgtctctactaaaaatacaaaaaaaattagccaggtacattggcacatgcctttaatcccagctaatcaggaggctgaggcacgagaattgctcgaacccaggcggcagagcttgcagtgagcggagatcacatgactgcactccagcctgggcaacagagcaagactccatctcaaaaaaaaaaaggccgggcgtggtggctcacgcctgtaatcccagcactttgggaggctgaggcaggtggatcacgaggtcaggagatcgagactatcctggctaacacggtgacaccccgcctctactaaaaatccaaaaatttagccgggcatggtggcgggcacctgtagtcccagctactcgggaggctgaggcaggagaatggcgtgaacccgggaggcagagcttgcagggaggcggagcttgcagcgagccgagatagtgccactgcagtggggcctgggccaaagagtgagactccatctcaaaaaaaaaaaaaaagaaagaaatgtgttgctggtatcagatatcagaccaagaacacttcagtctctctaaggatgccctgagctacctcactgttaaaggacgacatcaacacagaatgcactaaacaggaaataagctgtaatctagagaatttccattatgtgttactttttggtgactaacatggaatgttgaaaaggaagagctggaaagctcagttgttttccttgttcctctgacattgtccaggcaagagggcatcctgatcagatgagtagatttggctgagaaaaaccctagagtaaggcaggcactttgtggaggtggatgatgatggctcataaaaacgtttgttctcagtccagttcagggctctgccagcagtctttcagatctgaactgcttaaacaaaccctacagataaattggcactctgatttgtaattctgtttgtacaagtttagagcagcctagctcgagtcctcaaccccagtcctcttagaagtgaactgattgcactggatccctaaacccacaatgttgaggacacatgtgatgactccacttgctcagccagctggcctcttgcactttcccctgcccaccacttgtaactaccacttaattatcttgtgttaattgcttttgttgtgttgggtctgtatttttgtggtcagtgcctgcaggcagaaatgtgaaagcatttggtatgttgaagatacttgcttcttttttaataaaattaaaagtgcagcacgtaagtatgatactgtgtagttttttgacacaaccatgagatacaataagcagctttgacttagtgtcccaaaaagtggttcttggtctacagcagggcaaacatatatgtggcaagttctgatcacatacttttagacagaaagaataaaaaattcatattgcatggcttttgtagcctaagagcacagaatcatacacgtgtgttaggagaaacattcattctcacgcatataaactggctcctggcagagtagagcagtaagtgggatcaaaggtgaattcaccttattttcagttggtagagtatggaaaaatgtatcacttatttgaaatacctgaatggaaacccagcctctactactgtaacttaacacttgttcttcctgagcctcaaattttctttctctgtaagaatgggaattaatgcccacctacgggttgcaagtgcttacaggagctgggcaagcaacgaaggtaagagttgtagagacttcggtaaactggagcacatgattcctgggaagcaggcctagtgtaaacaatttatttttctagaaaagacagaagtttagagtatatgaaatctaatttttaagtattggttggcaactaattgactatcgtctaccataaggttatatgataattattagggcaggagagtgaatgcatcttaatatgcatggcagaactgtgtgtttccttccatctggattttcataaagctttctgatttatcagtaacgatctgaaaaatgtactgtggcatgtaacatcttttattcattttattaggcattagaggaagaatattctgtagtcctgctttattctgccatctttacctggaaatccatttttataaaatttttgtaataaaaattcacttgatca

SEQ ID NO: 15545 - DNA, 31111 bp, Homo sapiens
gagcaagcacgggtggcgcgacacggacctgttcagccagcccacctactgctgcgtgtgcgcgcagcacattctgcagggcgccttctgcgactgctgcgggctccgcgtggacgagggctgcctcaggaaggccgacaagcgcttccagtgcaaggagattatgctcaagaatgacaccaaggtcctggacgccatgccccaccactggatccggggcaacgtgcccctgtgcagttactgtatggtttgcaagcagcagtgtggctgtcaacccaagctttgcgattacaggtatggtcttcgtggacactcactgtcccagaatgcgccgtgggaatcaggatttcatagagtggtgtagaggcctgctttaatctctgctgatgacctaaactcattttgaggaaacaagctaataaataaacatccctgagtttgtgcaagcgtggcagctttgcagtagtcatttgctgagacgatgcatccagcctccactcctcagccagcctgcccttttgggtaataaaacttggctcctaacgttaatacagaggtttctaagtggtgcctgcttcatggccactgtatattttagcttttgttcctatcgattatctccttattttaaataaggaaaaatgaaatatggacaaattaacttttcccttcagccgcaaaactgatgggtcacaggttttgtactatgaatgtgcagtgaaaacaagtgtcattccaaggcagcacttttatgtcttttgctaatatagctgttggtaccatagcgaaatatactcaaaaagaacactgaaaggaatattccttttgacgcttggtctttcaggacatgtagaatcttagataagtgaccttgattaagccaagaatattttaatgtcttttatatacacactggacaacacatttttgtccttaaatattgtttgaaaataggtgaagatgtcctttgctgatgttggaaattggtaaaggagaatgctgctttgcaaatgatctattctaactcagttcacagttgagaaaattaaagcccgttaggtccactctggtaaaataggactggcctccaggatttccagctctggactaacacttagcctcctttgagccttaagtctggacatcttcattgtaatgggttttatttctgacaagtagaaaggcgcataaacatgcttaagaaatgaaataggcagtaaataggaagctgctttttaatttttttaattttttttgcagaaattctttcattagcatgaacgctattataatgtcaatacctgtttttaagtcttattttaaataattttacacattatcaaagaggcttaagaataaatgttcaaaataatgtattctagacaactacaaagttttgtaaccatgcatttttatttggtatctttaaaaattaaatgctgtccttctggcatcagtgagagccaagttagcagggactttaaataaatttcataatgaattgagtattgttctatttccttcccttctctggtgtagcctccagcagtctgtgtctgtgcagaattatattaaaaatggtttccataaataaccgtatttcaaatactcttgaacacataatcatgcttctgatcctccacccaaatgatctttctaaaaatgcaaatctgatcaagtccctgctctgcttaaaatcctttaaattgctccccatcgggtaagctgactgttttacagtgtaaacccctaagtgctttttcacagggtacataaggtcctagtactttctggcctctgtccttttagttttatctaccaccacctgcattaaactttatgcaccagcaacactaagcttcttgtaatttccttaaaacgtcaggcattttctgacatttctgcccctttgctcaaagctttcctctcagtattcttctggctagcttctaggcacccttaaagacccatcccatgtccttgtcctttccttcaggaactcttacctgatctactcagcttccctcctcccccagtttttcctttttggtgataacgtaatatcctatatctcagtggttctcaaagtaaggtccctagaccagcagcatcagcatctcttcaaaatctgttagaaatgcaaattctagggttgctagatttagcagataaaaataaaatattgcagaatttggaacataaaaagtttctctgaaattcaaattcaactaggcattgccgtttttttgttttttttttctggcaaccctagcccaaccccagacctactaaatcagaaacttgggctggacatcagcagtcttggttttaacaggccctacaggtccttctaaagatggagaaccactgctatatttacatatctttaaaaacatgcacctccgtctcttaattttgtatcctcccattgagcacactgaatctgtgtgataataaatcttcttttcttcattagtgcatttttacagagtaaccccttaccccatgatagaaattgtctctgtgtaatttaggagatgtttattattcccaagagaagagaccacagtgtcctgaagttgtacatattctacagtgttctgaactgatttatgttggccaataattgtatacaggattacagtctcctgtgaccttctgtaggaatgagatattttggaaggagaaacaaaataaatagctacttagaacctttaaacacagaccagacagtcctctggattttatctagccctgaggagagctccttccctgtctgcatctcattcttagggaagtgagtgaactctgcagacaagttacatttcaaaggacactaatgagagatgatgactgagtttaaagcctgcagaataagtgagaaaggccctttaatttatactcattcgatcattatacttattgagcatctatttttgttctagacactgctagagtctactttgtctgtagattttttctttttgtgtgctcctgtttctacccccaaccactacatcttctttttcttcttcttatctctcctctgactaaaatagggaattaggttatatttttacatattcaatatatttattaaatgaacctttgtttcttgtagtgttctatctcattaagagaaaaagaacttaaagtgctttttaatttattggactttttattcattacatctaccccacgcctcacacacaattactgtgattagtaaaacaaagctgctgactctcagaaggcagttagattggcctcagtgtaactagtctcagctttgatcataaattttgtttctatattctattggtgtgtgtttattcatttcattaattatctgaaacagtgaaagataccaaatcatcttctagagcagaggtgggcaaacttactgtaaagagccaaaagaattttcggctttcccaaccatttcgtctgtcataattacttaactctgccatagttgcagtgcaaaaccagccatggacaatacataaatgaatgagcttacctgtgttccagtaaaacttcattcacaaaatcagatggcagacatatttgcagtttgcagaaccctgttctagtgaatcttataaatgaccatctcaactttatgtataattcagctgcctccttcagcacactaaaaaagagagctattgtgaccaggtaattttttagagaaaacaagccttgttaaaccttttttttttctataaatactactgcacaagaacggcatataaattcatgaggcattccatattttcatatgaaggaactttctagagtaatgttctatatcttgataagggttttagttacgtatgttcatttatcaaaactcaggaagtatatacgtacatttcattgtatgtaaattttacatgaaaaggaaaaaacatcatgaattctaggtagtgataagcctatttgctgatgtattcaggaagtattctgatgtcttcagtttacttggaaatgtactaaaaataagatgaattaatggatagaaatgtgacaaagcaattacagtaagatgttaatggtagaatgtaggtggtaggcatacctgtaaaaaatatttttaagtaaaatattttaaaaagcaagtaaactattcttgcttttagaatatatttgctaaaatattgaagggtgagatctcatactgtctgcagtttactttcaaatgatcaaaaaaatatgaatttatatggaaagagaatattgtgggagaaaatgtcattaagaatcagcgtgaagggtgggcttagggtattcattttgctatccttttgacttctctgaaagtttggaatttttcaaaataaaaagaaaaaagatgataagctgttacccaatgacatgatgctaaagctgaaataccaagacattttagtaatgtcttatcttcccagtgagtttgaaatctaggttgttaaataccaattacaacataggtaaagacaataggattcaggtttgaatatggtatttctaaagaagaatgtaatactgagtaattagtaagcattttattttattttgttttttgagacagggtcttactctatattgcctaggctggaagacggtggcaagattatggcttactgcagccttagcctcccaggttcaagcaatcctcccacctcagccttccaagtagctgggactacagacatgcaccaccatgcctgatattttttttttcttttttgtagagataggagtatcaccatattgcccaggctggtctcaaattcctgggctcaagcaatcctcgcatcttggcctcccaaagtgctgggattgcaggcgtaagccaccatgcctggccctagtaagcattttagctgtacctttatagagcaaaggctcataatagctattatcttggttaaaataatcttttctgggctgagcgcagtggctcatgcctgtaatcccagcactttgggaggccaaggcgggcagagttcgagaccagcctgaccaatatggagaaaccccatctctactaaaagtacaaaattagccgagtgtggtggcgcatgcctgtaatcccagctactcgggaggctgaggcaggagaattgcttgaacccaggaggcggaggttgctgtgagccgagatcgcgccattgcactccagtctgggcaacaagagcgaaactccatctcaaaaaataatagtaataataataatcttttctgaaatttatgagaatttaataaatgataagtgttctgtcacaaattattgggggtagaaaagatggttttatgaatcgtgttaggacaagtgctcttgggggaggggagaaggttaactcttcataatacgccagatttattatgggtagattaatgcagtagtttgttttgttgttgttgttgttgttgttgttttttgagacagtctcactctgtcgctcaggttgcagtgcagtgacatgatctcggctcactgctacctctacctcccaggctcaagtgattcacccgcctcagcctcccgagtagctgggattacaggcatgcaccaccacacctggccaattattttttatattttcaggagagacagggtttcaccatgttactcaggctggtctcaaacttctgacctcaggtgatccgcccgcctggcctcccaaatcctgggattatacgcatgccccactgcgtccagccaatacagaggatggaaaagcccgacacttccatgagattctgaatggaatctatagccccagaaggttaagaagcactgaattaaagatgtaactatgacaactgaactgggaggggggggaataactataggtgaatatctaggagatggtaaaagacttcaaagcataacagcatttaattaggtgcctgtagcctagctactcaggagactgaggcaggatcacttgagcccaggagttcaggccagtgtgagcaacatagtgagacactgtctcttaaaaaaaaatttttggccagactcggtggctcacacctgtaatcccagcactttgggaggccgaggcagactgatgaggtcgggagtttttgagaccagcctgaccgatatggtgaaaccccgtctctactaaaaatacaaaaattagctgggcgtggtagcatgcacctgtagtcccagctgctcaggaggctgaggcaggagaatcacttgaacccagtatgtggaggttgcagtgagccgagattgcaccactgcactccaagcctaggcgacagagtgatactctgtctcaaaaaaaaaaaaaaattttttttaaatgaaacagcatttaagccaactacaaacggaaatacatatctgtatatatatttttaaaaacttaagtagattaaaaagacaattttaaagaacactgaagcatgtttgcaataaatatgccagaaaaaaggttgatattctagttaaataaaattacatgcaattattaaaacctagtgaaagatgaatatggaacatgactgaattcacaaaagggggctgaaaaactcagttttacctactaatcagacttccagattaaaacaataggatacctttttctatcaaattatcaaagaaaaattaagtactaatgagcggtattaataagtgttagttatgatgggcactttcatgcactcgtaacaagcatattggacaaacatccagaaccttgggaaaatgcatgccctttgattcagtaacttctgagattgcaaagaaataatctcattcatttacccatgttatttatattttcaaaaataaactaaatgtcttttttaaaaaacagaaaaggggtcaggttttttttgttttgttttgttttgttttttgagatgaaatctcactctgatgcccaggctggagtgcagcagcaccctttcccgggttcaagtgatcctcccacctcagcctcactagagctgggactacaggcacacgttaccacgccaagctaatttttgttcatttttcttgttttttgggacagggtcagataaattatacgatattgacatgatgtaataatatacattctttacaaaccatgttttaaaaaaattgatatacaaaaaagtttatgatacaatgtagaaaagcattatccagatatatatacatcatacttctaagctgaaaaacaaacgtatacactataaaactgagaataaataagtcaaaaagttaagagtgactctctggatgatttttattttatgcctttttgtatttttaaatttttataagctagtatttaaaataatttttaaaatttatacaagtagttcatgtttatattctggtttttaggatctcaaggaatacatacaaaaaaaacatagcctaaaaacttaatattcttcccattcctcagtcctacttttcttcccagaggaaaccattatgaaataattcagtgggtatcctttctgattgcttttgatggtgatatactattttaaagttatggtagaccaataaataaagatattatacttcagccacataaccagtctattatagtttctcaagttgagtttaaaattaacaaatgtgattatgcaaattatttcagttttctctgtaacagattatgcagagaactcttgcttttagcagtaaataggactcgagtatacagcactaagtacttgacaaatctgaatatccaaaaggaaaaaacagcttaaaatagaaggtcaccagaggacctctgggtgaaagaatgtttatcctcttttcttttttatattcatttaattataaccattcttttctggtggcctgctttatctcttcagtcagatctgccttatctgtgagtggattaaatacttagcaaattaataatagaaacccaggacctttaccagctctgttctctgcttgttttaccaattgggtccaaacatagttgcaaatctgaatgcacatgttcttacgtctatttcaaaagcaagcatatgaattattttcgtattaactgacaaaaagaaatgcacggttgtacttacatttacaggttaagagattttcaagctggaccctcaggaactcttcaagggtccatgtcagtggggcatttaaacagcaaggactttaggcctcatgaacctacatttcagccaaagcacaaatatatataaaactatcattttagatcagcttttgtttatgtggatcatatctattgatatttaccatgtcataaattaaaactgataaattttttaaatatttttaaaataatagttacaaatggtttttatgaaaatttagtgaggagagttacattgttttaaatttttgcacatttctttcacttattattcagctagagtatcatatttgcttctattgtcatagcacatgtcataaagcttctggaaaattccactgtacgcttttgagaggttgagggtgaaataactctttagtgttattattaaaattttaacctcacagatgccctgaatggatcttggggcccacattttaagaaatgctgttaggcggggcacagtggctcactccagcaatcccagcacttatgggaggccgaggtgggtggatcatttgaggtctggaggtcaagaccagcctggtcaacgtagtgaaaccccatctctactaagaatataaaaattacccaggcggtagtagcacgaacttgtaatcccagctacttgggagactaggcagaagaatcacttgatcctgggaggcagaggttgcggtgagctgagatcatgccactgcactccagtctggtggacagagtgagaccctgtctcaaaaaaaaaaaaaaaaagtgctgttagattaaactgccaaatatgttcaaaccttattgctccatttcactgtgcagatagtgcatatattttatttgccaaatgttatggtaagtagtgataaaattatgttttattttttaacaaaaatgattgttttgtgggttatcattgagattatggtttaaaattagttaatgcttgtttcttccttccctcaggtgcatttggtgccagaaaacagtacatgatgagtgcatgaaaaatagtttaaagaatgaaaaatgtgattttggagaattcaaaaacctaatcattccaccaagttatttaacatccattaatcagatgcgtaaagacaaaaaaacagattatgaagtggtaattagagtttatttctctaatatgattgatttttaaaaagctgcttaactcattgtttgagatagttaagacagtatgtaagaagaattggtgccaggaataaaataaacttaaataacagatcaagaccaaggagagaaataaaatgctattatggtaagccataaaatcctacctagttcctagagatgggtcaaaaattttggctcttgagttctttcatgtctaaaaggaaattggaaatgttatattagtggtttccaaatcattgcctgcatctgaatgatttagggagctttttaaaaatacagatttctgagtagtaccttcattgccatatttgatttagtaggtatagggtaagtccaggaattcatctttttttttaaggtcctcagaagattctgatgaacagtcagttttgggattcatgattattgtcagtgaaaagaaaatagattttcctcacacctttttctaaaactatttttctattttgaactttatacagggtccctagagataagtttatgttgcacattaaatgctcccacaaataatggtgaacactaaacctgttaacagtttatagatgtagatatgtgtatgaaattgatgtaacttattgaatctctcagtctttatgtagctcttaaggaaacatcataaaaatttatggatttattttctaattggatataccaaaataattgaactattttattttaaaattgtacctttttcaaattaagattttatgacttacatgccacctttgtcaatattcctgcaagggaagggacattttaaatttttcaaacaatattgttttgacagtttttttaaatgtacaatctcttatttatctgagttcaacctgagatcacaagagagaagaatctctaagtaaaactatagaataacttcattaatggttacatctacaaggagaggggaagaagaaatggttacattttgaaaagtattaatttcatttgactttgagctattagaagtccagattttttaatctgagtaccccattttaaaaaaagaaataaaaccttgcaaaacacaccagaatacatccagtaaaggaaaatcaaggtgaaaggtcagagaaaaaaatcagtgtctattctgtgaatggttgaaagttatagaaagacagattttcaactcagtttaagtccaaactttctaataatttgatgtagcagtgtaatgggctgcattactagtgagttccttatgtgagtgtgcgagcatatgctggatgacttatctagaataatgtagaagagaattaaacattgaatgggagcttaaattagttaatttctgaggttcccttccattcttagaattctttgatttttatattgaattgagagaactagtatagtttttatttcagcaaattatagcaccattgttctcaaggcatggaaaatgtgcttttcatctttaagatactaaaccttttcactcatggcaattttttttagctagcctctaagcttggaaagcagtggaccccattaataatcctggccaactctcgtagtggaactaatatgggagaaggactgttgggagaatttaggatcttgttgaatccagtccaggtaactaaagaaaaaaactttttatattaatgttttcattttccccaaaatgcaatgattattaatgcttcaagtcactaatcacctgatcataggaaagaataataattacaaaaagatcagccatttaaatatgtggataaacaggcactcttgtgggaatataaaatggtacaacctctttagaagacatcttggcagtttcttaaaaagataaatataaatttattatatcttctagcaagtcctctactaggaatctacccaagggaagtgaaaacatatttctcacaaacatttgcatgaaaatgttcacagcagcattattcatgatagctgaaaagcataaacagcccagctgttcatcagctgatgagttgataaacaaaatgtgatgtagccctacaatggaataccatgaaatgacaaaaaggaacaaactactgatacgtatatattacaataaatgaacctcaaaaacatactaagtgaaagaaggcagatacaagggaccttatattgtatgactccacttatgtgacttgtctagaaaaggcaagtctgtagaggtagagaatagattattggttctagggctggaaatggggagtgattgcgaatggacattgagggatcttattgaagcaacaaaaatgttctaaactggatgatggtggtggttgtgcaattcagtgaacttaataaaaattattgacttgttcacttcaaatgggtgaatcttatatgtaaattatacctcagttttaaaaataaaagggatcgttaaaattgaatataattttactttgaaaaattaaccaaaaaacaaaaaaatacaaaaaaattttaaagacaacccattgtgtagcaattagaagtgcaataactttgtccttccaatttgtattttttacactttcaatattatacagtttaagaaaattataaaaaatacagagaaaatcatttgcaatttctccatacaaatacatcagttctcttttttcttgttctttccattaattatctatgcatttactttacatattaacagtactataacaataatctagatacaaatttgcattctgatttttttaattttaatggtataaatatttttccttgtttcaacatagtcctcatagttacatatttaatgactaaaataattgaatggaaatagcattatttatccagtctctactgttgaaaggtaacactgtctctatgattgtactataaataatgccacagtgaatatttttatacatatttttaggcatttttgtctttcgaaatatttttctagggtcgttgacagaattatggataatcaaagttacttgcatttttatgtcattttctatgtattgcaaaattgctttccagaaatttgtgctaagttgcactggtgatttttttttaagccagtataagatatgaaacactaattaaaggtgaacttagcacattgtggtttatgtgaacaagaaggaggcaatgtggtatagtagataaactataacttttttttttttttgagacagagtcttgctttgttgccgaagctggagtgcaggggcatgatcttggctcactgtaacctctgcctcccaggttcaagtgattctcctacctcagcctcccgagtagctaggatcacaagcacacaacaccacactggctaatttttgtatttttagtaaagacaggatttcaccatgttggccaggctggtctcgaactcctgacgtcaagtgatccacccgccttggcctcccaaagtgctgggattataggcatgagttaccacacctagccttgtatttcagcacttaattacctggacaatcacaggcaagtgatttaaccttcctgcacctcagtttccagcccaatagaatgaggctaactcttgctttgtaaagtcagtgtggggatgagctacaatgaatataaagagtctggcagggtgcctggcatattgttaaatacatagtagccagtaatgttatttaactgtatctctactcatctagagggaaatcatcattacagatgaaggaaaatgttggataaaaataatttgtctttttcttttgtttctaggtttttgatgtaactaaaactcctcctatcaaagccctacaactctgtactcttctcccatattattcagctcgagtacttgtttgtggaggggatgggactgtagggtgggtcctggatgcagttgatgacatgaagattaaggtattagtctttaagaactactacagaaggacttctaagataaatatactatacatatatatatatatatgggttttgttgttgttttgttgttgttgttgttttttcttgagatacagtctcgcactgtcacccaggctggagtgcagcggcgcagacacagctaactgcaacctccatttctcaggttcaagccatcctcccacctcagcctacaaagttgctgagactataggtgtgcgctaccatgcctggctaatttttgtattttttgtagagacagggtttcaccatgttgcctgggctgctgtcaaactcctgggctcaagcgatcctcccaccttggcctcccaaagtgctgggattacatgggtgagccactatgcccaacctaatatagaatatttttgctttatattttttattatgcagatgaatattagacattgccagcttcaaatagttaaaaatgagatgttttgattaagcaattagcacaagctttagcaaaacaacatacagttgttatatttgtatccttactgttttggtcttattaaattttacaaaatattattacccagcaaatagtctgagagaaaaatctaaaacatatcttccatattctagggacaagaaaagtacattccacaagttgcagttttgcctctgggaacaggcaacgatctatccaatacattgggttggggtacaggttatgctggagaaattccagttgcgcaggttttgcgaaatgtaatggaagcagatggaattaaactagatcggtaagttacgtttccccaaaaagtagatttcttgagatttagccataattggttaacaagtgaagacttgtgtagatgaaatgtgccatgtaatttaaatgtgaaagactatactagttgtacctacacagatactggtgttttgttttattatgtaagagccgaagtaataagttacactgagtacttatccctaaatttgcatgctcatatacgtgtggttacttttgtagatggtattttaatagaaaaccctcatttatccaaacatccagagtatggggtttattgtaaaacgtgctgttttttttaacttctgttttttagatggaaagttcaagtaacaaataaaggatactacaacttaagaaaacccaaggtatgttgttagtgcctcagttgcaagtggtttcagcttcattgcacaagatacggcactctgtggtgggatacagagacctggtgcttatctcaagggagctggctgtggagcagaacagaagcttatatgcttacctcacaagctggactgtaaatgtgttatgggagagaacagggtgcaggtatgcttagttctgccctagctgagaagattcagaggaagtggtacgggagttggtccttaaaaaagcaaaggactttccaggcagagggaaaagaggtgagagagtgcaaagcatggttagcaagtagcaaataatacagagagagtagatctgtatttttaaaagatactctggagataatgtgaaaatagctcagaagcctgcactaggtagaatcaggatgaggacaatgcaaagacattttagaggtagaattaatcaatacttgacaactgattagtataaaggggagagagaaaatacatattactattagatttctggtttttataactgaatatatggaaatgactataagaaaaataccaagtttcaggtttgggtaggaagaaaatgagatagatattgggcatatcaatctaaaagttttcgtagtgttaaacaagaagttggacgtttaggcttattgctcaggaataaagacagagctagagatgcagattgaggaatctagactgggttaggaagtaaaataaactggggagggggcagggggagtagcccaagttgtgggattcacatccctatttatcagcctttgaactgaagccttatttctgataattgtttaaatgctgagaatgcataagagaatgtggggagtgagaggggaaaagagggccaagaactacatcttttctttttttttttttcttttgttgtggagacaaggtctcagtctatcactcaagctggagtacggtattgtgatgacagctcactgcagcctcgacctctgggcccaagcgatcctcccacctcagcctccgaagtagctgggaccactggcatgtgccaccatgcccagatagtttttgtttttgtttctgttttgtagagagagggtctccctatattgtccaggctggtctcgaactcctaggctcaagcaatcctcccacctcagccttccaaagtgttgggattacaggcatgagtcactgtgcccagccatgaactacatcttgcaaatagatatatttaggtgacacagattaagagaggccactaaaggagactaaagagtgtagtaagtaaataaggagaaaacagagaaagagaattacagtaggtgggtgataaacagcaaaattaaagcagactttaaagaagagcatttggggaacactgatgcatgtttctctgcttctccatctccttgccactgaaatccctctaaaatgtgcctctaaaagatcttgtataggtctttgagaaggcacaaaaccttaaggagaaagagatcacagcagtcttcagaagccaaaactaggaaggttcgcatattgaaaaaagctcaaaagtgcctacactgcagaaaaccaagaaagaaaccagtttattgagcagaaccaagcaaaggcttaggaattctatgcttacctcacaagctagactataaatgtgttatgggagagaacagggtgcaggtgtgcttagttctgccctagctgagaagattcagaggaagtgatacgggagttggtccttaaaaaaagcaaaggactttccaggcagagggaaaagagatgagagagtgcaaagcatggttagcaagtagcaaataatacagagagagtagatctgtatttttaaaagatactctggagataatgtgaaaatagcttagaagcctgcactaggtagaggcttctaccacatcactcagagagcagtagtatagagtcaccacatcactcagagagcagtagtatagagtggttctgaaaatagaaggagtgagcgaaagaagctgtttgtcccctagatcacttcccctttccccaacttcacatggtcatttactaccctcctcaactcaggtagtagattggaggtttactccggaaagtttagagactctagccagctaacgccatactgaaaacagatttagtgcaaagtgagatcactggcccttttcatccactcaacttcaagaatagtggcagagaggatttctctctggggaagctaacttgcccaagataaaaattaacacgtaccaatatttgagtgtcccgtagcaaaaggaccagatttttgcactgtagtcctataatgaagcttataccctagcaagagctgcttttggatgcaaagttcacagtttgccttttatgccttactcttaaaacatgaatatatacagccaaggattggaggcacaaacaaacatttaaggaaagcctctgccatgagagagccccaaagaaacaacaagaaagaattgtaggaaacacagtccaggaagctgaaggaagtcagggagtgggactaatgttctcagagaaaaatgaaaatattaatagaacagggttctataaaaggaacattcagaaacacatacctcaaaaaaggctcttataaactaaaattcggtatcagattggaaagtacaattgaagacaccactcagaaaatacaacaaaaagcaaaggaactggacatgggggcacacacctgtagttccagcaactcaggaggctgaggcaggaagattgcttgagcccaagagttcaaggctgcggtgagctatcatcacgccactgcactccagcctgggtgacagagtgcagataagaccccatctctaaaaaaagagaaaaagaatacagtaagtaacatttaaaatttaaaaatcacaaattggcggggtgcggtggctcacgcctgtaatcccagcactctgggaggctgaggcaggtggatcacctgaggtcaggtgttcgagaccagtctggccaacatggtgaaaccccatctctaataaaaatacaaaaattagccgggtgtggtcgtgggtgcctgtaatcccagctactcgggaggctgaggcaggagaattgcttgaacccgagaggcagagggtgcagtgagccaagatcacgccactgtactctaccctgggcgacagagcaagactctgtctcaaaaaaaaaaaaatcaagaagtaatgatctgattatgttatttagaaatatagagataaataccagaagaaactacggaaagagctctgggagcaggaattataaatgaggaggagtagacagaaaactgcagtgtttcctttgaagccttgtagaactatatagcttattaaagtggattgctttgatttattttaaaaaaaaaattgaacgtaaaaaaatagagaaagtattgagagatcctttaaaatggttcctgtgcttaaaagtatttgtcagttatcatagtgcctgaaatgccaacattaaagatgtatttctctttttgatagtagccaatctaataggtgtgaggtgatatagctcattgtggttttcatttgcaattctctgatgattagaaatgttgagcattttttcatatgcaggttgaatatcccttatccaaaaaaatgggaccagaagtatttcagatttctgatttttttggattttggaatatgtgcagaatatgtaccccttgagcatttctaatctgaaaagctgaaatccaaaatgctcccatgagcatttcctctgagtgtcatgtcagtgttcaaaaagtttgagatttggggacatttcagatttcagatgttcatattagggatgctgaacctgtgtctgttggccatttttatgtcttttgagaaatgtctcttcaagtcctttgcccattttttaataagattattggttgttattgagtaacttcagttccttctacattttggagattagttccttatcgagtgtataatttacagagattttctcccaagctgtgggttgcctcttcactctattgttttcctttgctgtgtagaatctttttagtgtgatgcaatcccttttgtctatttttacttttattgcctatgcttttgagatcatatcaaacaaatatcaaacaaataactgcccaggccaatgtcatgaagctttttccttacattttcctttagtacttttatagtttcaggttgtacatttaagtctttaatccattttgaattgattctttataatgggtgaaataagggttgattttcattgttctgcatgtggatatccagctttcccagtaccatttattgatgagactctcctttccctattgtatgttcttggcacctttgtcagaaatcagttggccatagatatgtgtatttatttggggcttttctatcctatttcattggtgagtaataacaaatgttggcaaggatgtggaaaagagagaatccttatacactattggcattgcaaattagtacaaccattttgggaaacaatatggaggtttctcaaaaaactaaaactagaattaccatatgttccagcaatcccatttatagatatatacccaaaggaattgaaatcagtatatcaaacagatgtccatgctgccatgttcattgcagcattatgtacaatagccaagatgcagaaataacctaagtgcccatcagtgaatgaatggtttttttaagtatgccatatatacacaatggaaaactattcagactttaaaaaaaaaaaaaaacaggaaaatctgtcattctcggcaacatagctgaacctagaggacattatgttaaataaataaaccagtcacagacaaatattgtatgatgtcacttatatgtggaatctaaaaaatcaaactcaaagtcgagagtagaataatggttaccagaggctgtagagagtagtagagtagatggagaaaggggagacattggttaataggtacaaagttttagttaggaagaataagttctgctattgcacagcttggtgactatagttaataataatgcatattttcaaattgctaaaagagaggttttttgtttttgttttttgttttttttgtgtttttttgagacggggtctcatttgaccatgcagtggcgtgatcacggctcactgcagcctagacctctagggctcaagtgatcttcacaccttagcctcattagtaactgggactacaggcacatgccaccacacccagccaattttatttttattattttcaatagagacaagatttttctgtgttgcccgggctggtctcaaactcctgggctcaagcagtccacgcccctcagcctcccaaagtgctgggattacaaatgtgaaccactgtgctcagcctaaaagagaggattttagatgttctcaccacaaataaatgataaacatttgaggtgatggatatgcaaaaaaaaatgatgtatttctcattcataccaggatgtattactattcagtaataaagcagagctgagtatttaaaaatatttatcttatcagagatcattcctccaaagaaagatggacaaagtttcacaccagttagatgattcaaataagaagacatgttcttcagccatttgctgtcaagaaataagatatgtcattaaaaataaatatactacaatcaagtagggtctgcttacctctatagaagaacatccaaacaatcaaataaaagaaggaacttcatttctctatacattcaagcaagtgttttgtgcccatctggtgccaggcactgtcgtaggtgctggagtttcagtgatgaaggccttgtccttatgaagcttatattgccccactcttagtttctgaataaaggacacctaggaaactagaaaaaaaaaattcagttaaaaaataaaggcaaattaatgtacattgacatattttatttaaaataaggtgtttatgggttttttttttaaagaacaactaggattgaaaattatattttggcagtgaagggacagacatttagttccataagagatgaacgggaaaagcatgaaaagaacaagtgaccaaatttagacttaaccatcaaaaggaggaagagcgtctttgatttggaggagaaaggtgcacttgagtaaagtcagagtttttagatggcagaaagagagcatgagaattcatacctttcatacctgaggatctcacttttttcagtgaggcaagaatcaagatcatctgaacataacaaaggcaggagagctggttatcagggacttgaagagaggtaaattttgaattaaaccactagggaatacaggaaaggagtcatctaaagggttactgtgtcctattagcgattgtgtccagccatccttagaaataactttgtaacaggatcataattataagattcttaccagcagtgtccagcaacctggaaatagagcagagaaaacagtttggtttagagaagattagcaagtaaggctggccgggcgcggtggctcacgcctgtaatcgcagcactttgggaggcagaggcaggcgaatcacgaggtcaggagctcgagaccagcctggccaacatggtgaaaccccatctctactaaaaatacaaaaatattagccgagcatggtggcgggcgcctgtaatcccagctactcaggaggctgaggcaggagaattgcttgaacccgggaggcagaggttgcagagagccgagatcgcgccactgcattccagccagggcgacagtccgagactccatctcaaaaaaaaaaaaaaaaggctaaattgagaagaggtcaagggtgtgttggaacgaaggatggtgttgagtacagtcattgaaatgattgaccttggaatccaggccgcactgggaagtaagataaattaaggtgagaccagtagcctgggttgggactaatagaagctgagagcttggaggctgtgataaatgtaaagagcaaatgtaatgggaacacaggcatgaaaagcctggaagcatcaagtagagccattctagatggtaaggtctgaggtgtagcatataaaacagaaatggaagatgagattcacatctgtagttatcagccttaaatggaagctttatttctggtaacttcactggacagtataaaatagccatgtgaaaagtaaatgcagaaagcatctccattgtcaaaagaacacaaagactaagattgacatttaattatgactcaagcttaggtggaaccatagtctgttgcttattcttaccctttctcacaggaattcacaatgaacaactatttttctgttggacctgatgctctcatggctctcaattttcatgctcatcgtgagaaggcaccatctctgttttctagcagaattcttaataaggtgtgttggataaaataacatttcctgcttatcaccgaaggtacagtaaaaatcaatagttcaattatatttagcactcctagattcagatttaactaacttacagaaatatttacctgctctgttttgtgtagggttgtcaaattagatcttttttttttttaattagatctttaaatgtgctttatcaggccaggcacagtggctcatgcctgtaatcctagcacttttgggaggcggaggcaggtggatcacttgaggtcaggagttcaagaccagcctggccaacatggtgaaaccctgtctctactaaaaatacaaatttagccgggcatggtggcaggtgtctgtaatcccagccactcgggaggctgaggtaggagaatctcttgaaaccaggaggcaaaagttgcagtgagccgagatcataccactgcactccaacttgggcaacagaatgaaactccatctcaaaaaacaaaacaaaacaactttatcaaagtattatataactctaacaaattttttaaattcaaatttgggatgttttataggatattttgcttagatggcaactaaatggaatatatgatagtttatcttaaatggcagctaaaattggaaggaaattttaggcagaataaatttttggtgaagtcattaatggaaaagtagatttcattggtttgaaaaacctccaaaaggcagatgagataaaagagcagcctgtttgccacagctttgaactaaggtcatctctggtttctagtatagttgattccgttgatggaattttgcttaggaatttttttaataacgttcggtgattgaccaacaggatatcaaaaataaatgcctagcaattatattcctggttctgttttacaaatatttcaaattttgaaatagttcccttttattaatatagttactaaggtaatacgtattactatttatacaattgataattaactcagtccttacatcaacctttttgtattcataagtgattagaaaatgtttgttagattaatacgcattactattcctaagtaatctgaagtactaggaaaaagtggaattttctaattcgaatatttttctttataaaatacaacttttttgataaattgggagaaaacaccatttagaaaaaaatcacttctaggccgcgcatggtggctcacgcctgtaatcccagcactttgagaggccaaggtgggtagatcacgaggtcaggagatggagaccatcctggccaacatggtgaaaccccatctctactaaaaatacaaaaattagccggatgtggtggtgcacgcctgtagtcccagctacttgagagactgagtcaggagaatcacttgaacccaggaggcggaggttgcagtgggccgagatcgcgcagctgcactccagcctggtgacagagcgagactccatctcaaaaaaaaaaaaaaaaaagaaaaagaaaaaatcacttctatcccacatttcccctgagaaagaggataattaaacttaaatggaatggcctgtattgtcatcttccaaaaaagaaggatgagtaatatttcatctactgtaccacagttcacctagaacttttaaactattaatagcctaagagaataaaatgtaaaatacaaatgatgccaaaagtatctgtaatatgttaaaggcatttttatttttacattgtgttttgattatagatttccattgctgctcctagtggattccaattttaccctttaaaattactagaatggaggtgttggatagggccagaggttgcacaccaaaagtatcccctttggttgcccttcttttcatcagcatctagtctaccataaggagaatgtgtgcttcaacattcttaaagggagctttgatacagcgtattttttcttattgtttacagggttagattgttttaatattatattttctgtccatttttcataggcggtttacttattctatggaaccaaagattgtttagtgcaagaatgtaaagatttgaataaaaaagttgaggtaagctattaacactttttattttttaaagttttaggtggtctctggattatgaagactttttaaacagaaatgctaaactttgttaatatattttgccagcatacatagagtatttatttgtgtgccaggcactttgctacatgctttatacacattgtccctctaaattctctccacaattctataaggtatgtattatatattcacattatgcagaaaagaaaactattttaaatgaagtaatttgcccaaattctctcatttaatgcctaaatgcacatgtaatcaagatgtgaacccagatttatgtaaatccagtctgtttaactattagggtgagtggcctccattcatacatgataaataatttacagttatctaatacagtgcctgactcaacataaagacacagaggaagtttaaatggaaagtttaattcagattatttttgtcgggtatctctcttacataccaaaataaaaatgtataaatacaaaaaaaaaaaaattagccaggcgtggtggcgggcgcctgtagtcccagctacttggaaggctgaggcaggagaatggcgtggacccgggaggcggagcttgcagtgagccaagatcgcgacgctgcattccagcctgggggacagagcaagactccgtctcaaaaaaaactaataaaaaataataaaaatgtataaatagtaaaaatagaatattaatgattgcttattgcaacagcatctctgacatcatgatatggcagtctttttttttttgagatggagtctcactctgtcatccaggctggagtgcagtggtgcgatctccgctcactgcaagctctgtctccctggttcacaccattctcctgcctcatcctcctaagcagctgggattacaggcgcccaccactacgcccggctaattttttgtatttttagtagagacggggtttcacgtgttagccaggatggtctcgatctcctgacctcgtgatctgcccgactcagcctcccaaagtgctgggattacaggcgtaagccaccgcgcccagccagatatggcagtcttatatgtattccttgcttgattccaaaaagaatctgtaatggttaatagcaacaacagagacattaattcagagaaacctagaactgataaaataaataaaaagagatcataaacagtttgggaaaagagacaatgagcagggagtaaggagactgattatacattagtcaaggaaaaatgttgccgttaggcgtaatgtttagctcaaagtctctgggctgccatggcgtagaagtaagcaagattttctgttaaaaagagtgttatgttactttatcatattttatttttcctaggctttgatggtagagtaaagcatacaagcatataaaataaagacttttattttattgtctgacattttatttatataaaaatacaaattatttttaattatacagaaataaaataaattttatttatatacctacaaaatagtcattgtcctcgatactggaggtagacagtgataaatcccttgctctacatttacagtctagggtgaagaaagatatttaagccagtctgggcacagtggctcatgcctgtaatcccagcactttgggaggccaaggtgggaggattgcttgaggcaaggagactagcctgggcaacatagtgagactccacttttataaaaaataaaaatagctgagcatagtggcatgtacctgtggtcctagctgctcaggaggctgagggaggcagatcacttgaacccagcaggcagaggctacagtaagccatgattgtaccactgcacaccagtctgggtgacagattgagaccctgtctccaagaagaaaccaaaaagatatttaaatcacattgcaatgcagtatgagaagttatataagaaaagcatgtggtcttacaggaataaataactgcaatacgtaacctaggagctacagagactagggaaagtggcagtataagcaagtctttctggaagaagtgacaagctggaatctgaaaataagtaagagttagctaagagaaggaggaggggaagattgctgtaggctaaaaacagcatctgcaaaagacccagaggcatacatggcatatttgagtgagttcaggctggagcatagctttcaggaaggaaagacaagcgctgaggctagagagatggacagaagtcaaatcacagagtgtcatatttgcctggtattggatcttgtatttcatcatgggcattgaagggttaaagtgaagccactgaagggtggtaattagaggatgacatatttgcattttttaagtgtcgatccaaccgctctgtgagggatgcataagaaagtaaagctagaggcagataggccagatagaaacattttagggaagaaatggtgaagagagagaaagacatagaaatagcatcaacagtttttagtgattaaggggatgtggagggtaaaaagtcaaagaaatcaaagataactgccaggtttctggcttaaacacctgggttgggggtgagttaacctacttaaccaggaaagagtaagtaagagttagctaagagaaggaggaggggaagatgttactctttcctggtaagtacattggggaacagggagcaaattgcagaaaagttgcttgatcaattttttacataagagtttttggtgccagtccatggacatgttttatgggcagtggatagatggatctggcccagtttactttcctgagaaggaacatccagggaagtagagtctgtggttcccaggaagcaaagggaaagaagattttaggaaaagaggaagggggtcagcaagtgtcaggtgctactgaaacagcaagttaggtaagtcctgaaaaaatcacgaggctcaacaaaaagaacattattgttgatgttgatagaagcagttctactgaagagatagaaaagggcagatgagaggccctgagtgagaggtagggagcatcttctacatgtgcatctctcatatataagcacatttatgaaaatagatgtgaattctaaatggatgtgtgtggaaattgtgtatcctgtagtcactatctatttgtatttctttaaagctagaactggatggtgagcgagtagcactgcccagcttggaaggtattatagttctgaacatcggatactggggcggtggctgcagactatgggaagggatgggggacgagacttaccctctagccaggtatgtacatttgtggtctgtttttttatgtcactattttatttaaagcaatctcttgtttatagactttaacatttttcctcaaattttcttttttgtgtatctcattagttataaatattttttaagttgatggtccaactgtgttaaaaagtaattgctctagcataactgattttttattgcatcatataatccatattttctttttccaattttaggcatgacgatggtctgctggaagtcgttggagtatatgggtctttccactgtgctcagattcaagtaaaactggctaatccttttcgaataggacaggcacatacagtgagggtaggtgaaatatagctgtaacaggctaatttgtcccaatccaattctaagctgttgatatgtaaaatatacatgctatacttttctttaaacagtggtttatggctcatgcagctggtcactgtacactagcggctagagtgggatgaggaagaaacagaaacatggctcaagatccatgagataaaacgttcacttgaaaaaagaattccttaatcaatgaataaaaacatattcagattaatattttctaaaaatgaaatgcataagggttaagggattgtggatggtattattaaggaagacctttctaaatttggggggactgacttttaaacattatttgttccctaatatcagctgattttgaagtgctccatgatgccaatgcaggtggatggggagccttgggcccaagggccctgcactgtcaccataactcacaagacacatgcaatgatgttatatttctctggagaacaaacagatgatgacatctctagtacttcggatcaagaagatataaaggcgactgaatagatggatgagggagtgaaaactttgcatagaatcctcacgcaagtagatacatgttcatccaaaagtattaatagaaattctctatcagctattcagtcttaatttcactagtagtataatgggtatacatttttgtaaatagcatccccaaaccagccagccttcagttatttacaaatgtttgttcttttttcagcaaaatacttcaaatgaatagtattaacttacaaaaagtcacaaaaacttacatgagagtgaaaatttgttatgactgttttgagagtgggactcactctgaagtatgtgctgtctcatgtcttatttttgaaccatgcatatgatggacacacaatggatggacacattatatctccaacaaggtgtgggtggaaagatcaaattaacctgcttttttgaaaggaaatgattactgtcaaaccagcatggttaattgtgagcatcctcctgcagcatgccccttaagattttctacaacccaaaccaagtgtatgtattgatttctaggaacccccaaaaggagaatagtaaaaaaagatcatacttaaaatttgtattacaatttttattttaggaacttattcagacacgtaaatgttgtttaattctgtaggtaaccatttgagctgcaattcaggatcttttttataacaccagtgtagccaaaagagaaacagataagtgaattggtaagaaataagattcagagcacttgggattgtaagttataggttctgagctgaactgtttatcagccgctctttttattaaaagacagtgtcaacacttcaaaaaacgtgcttaaaggagacaacggtgagattaattgcttagaaaaagctcaaggctgactgataagttttaaaaatttggtggtcttgtagtattttgaaatacagtagtcttttaacagaatttccccttagggaggtaagtggacagaaatctttgctaaaatgtttatatcatatttattttaaaatgagagagatatatttttaaattatttattatttaccttgtggtatggtacctgtgtttagtgtttacgttctgtagctttatttaataagttaaattgatcacataaattctgctagtcacaatcagatagaaatttagtctattaattaaaattctaatttaattctcctgacagaaatctagatattcttattcttcacaaatattcctcattgtattgaaaaatgaaggagggcatgaaaagcactagggaactacttttggataactgaaagctttgtttcattgttttatttgcccctcaattgccacaaacttactgaagggctagtttcatggttcccattagagggtgcttgttcgctgctgttgaccagcccaagggtcgtgacccacaggtcggctgacccagagggcatccagcctggtgtttttctgacacatggcccaggctttgtggtctttcatgacattaatctctgaaagatcagaatgtatcccccaaaataccattagctatctttgagggtctattatgaatctgtcatccatgaattgccataaacctaagtttgcctcacctcaggcccagaccatgttttcaaagagcaacttagtaatgtatacagtagtcagtacattttatgaaatactctattttgctaaattaacctcttgcagatctcctcaggtgatcttaaattctagtcttgagaaactttgtgagcagatctgttttcagcttctttatatacctttcatggtaagtaaccatggcagtgaggatggcagagttttgttttttttttttttaatgggccaatcatgttctgagtattatgaagtttatcctttcattcatgatcaaaattgttaaagacatcacattttataaatacactgttaaatccactttgctgtaggttatagtttacctgttatataattcgtagtgctaattgtagtagaagcaaatcaatttaggatgttggaacgaaaataatcacaataactaatacagctttttaattgtgaaaactacaattaaaaattataattttaataccaaccataatattacactgtatttagaacaggcttatgtaaaatgccctcatttatctaaataagttgattttttggttattgtaatctagtaaggtttttgcatcactactggtctgtcatgaagtttttctgctggcttattcacttatttagacttcatttagggaagctatttcagaataccatctcataaaatgtatcattatcttgtttttgcaaaattcacttactttttgggcacatttacccagcatttcaaataagtgtataggcatgtgccttgtttaagtacaatttataagacttcatgtttgcaagttacatattagggtagtgattgtttatattaccagggattctacactttaccaaaaaaaattgccataagattttcctgttccattttaaattgtcttgatatttaaaaaaataacttctacattctcaggaagaaatacatgaagtaaatcatatctccatgtctgtttccagatttctctaatctttttactatcccaatacattcctaattcctataaacgtagtggcttaaatactgaatacctggcagctcttaaagatcccttaggcagatgatgataattttcagtgtttcgtcatgtttaatagaaatcaaactgacttgtgttttaaaatacaagttgtctgctagtaaagttacatgatttaggtgtgttttaggttttctgcaacaattagctgtgaacccctaatgtagctaagtttatacaaattttataatcaaaattatttatttttatttttttagagtatgtcaaaaacatatagtgtttgctttgtgaaatacatttgcttagagttataaaatatactgtgactcagaaattgtaaagtcagtttgcgttgtaaaaatgaatactaccagcatgtcaaaagaaaaataatttacatttgtaatataaagtaaaattgtatttaatatatttattgaattttaaatttgcactaacttgaaaactttaaaggttatactaatttaatgattaatgtggacccaaatacataatttggccaaaaaagtcattagaatgggtaatggttttgtgtggttttccttcaaaatgataatattgaagcaagaaccagcattttatattgataatttttttaatatttctacccagttgaggacagtggaatataagtagatatatttaaaatatctagatattt

SEQ ID NO: 15546 - DNA, 38986 bp, Homo sapiens
atgaggaagtgccggcccactgaagccgtggggacgcgcccagcggagctaatcaggtgccactgaactgaaggggtgaactagaggagaagagggtgactgggcggggagcagctgcgggagaagcaaagggacgactgagggaataatcaggagaccactgaggcgtgaagtactaggcgtgcgataactgaaggagttagtaactgggagcacagagttggaaacagcttaggggaagatggagaaggaagaaacggggaatgatcaagatgtgggcaccatgatgtggcaggaaaccgacttagatgttcagaagaagtcagtgcagatacggaggaaatgggaatgggaagaagtctgcaaagccaggagaaccgaggaaaggcttttgcctccagaggtcacattgcgttataaaactctgggtggtaaaagattataggcttagaccagtgtctttggattctaatgctggctgctctccatagtccatctgattccccagaagtcagttatagctcttcgcaaaccttggtgacttcttattttctttcttgtttatccaagattacctggctggtgtttgcttgttctggagtgatcttctgactggaaaagaactatgtcatggatcaaggaaggagagctgtcactttgggagcggttctgtgccaacatcataaaggtgagcaatggcccagagcaccggttggccttctggtcagttggataatcttatataaaaacctgttattaaagttgatgatgttaagtgcaattcatgatgttaagtggaatttagcaaggaaaccaaagagtcttagaatggtaacttccaggtctacatttctggtagacttttgtcctaactctgatattttctggaagcccaggcctcttaatgtcactgggcagcctagactgctaagtattctttatagagaactgaaatttgtttccctggaacattgatccattgttccatgtactgtcttcttgatttaaataggttaatctttgatatattctttgatctgtcagtagagctgggcccggtcactcacgcctgtaatcccagcaatttgggaggctgaggtgggcagattgtttgagctcaggagttgagaccagcctgggcaacatggcaaaaccccgattctccaaaaaattaaaaaaatagcagggcttggtggtgtgcacctgtagtcccagctactcggaaggctgaagtgggagaatttcttgagcccaggtcaaagctgcagtgagtcatgattgtgccaccacactccagcctgggtgacagaacgggactgtctcaaaaaaaagagttcagaacaagactctgtctcaaaaaaaaaaaaaaaaaaagagtttgggctctagacgcagacaaacatgggtgaaattcctgttcttttttttattttgagatggagtctcgctctgtcgcccaggctggagtgcaatggcgcaatcttggcttactgcaaccttcatctgccaagttcaagcaattctcttgccttagcctcccaagtagctggggttacaggcatatgctaccacacatggctaatttttatatttttagtagagatgggattctcatattggccaggctggtctcgaactcctgacctcaggtgatccacctatctcagcctcccaaagtgctgggattataggactgagccactgcacctggcctgaaagtccagttctatcatttagtaatcatgtgactttaacaactgtagaattatcatgagaatttatgagacattaatataaagcagttagcataatgtctagcagttcttaattattattaggattgtctttcagacatttgaagactattatctcctatcttccccaaatcttccctcagctttttctctaggaatcacagcaatattatatctgcctaagacaggtttgagattggggccagtcagcttggttttgtttttcaaccacaggctgtcaagcagcaggtagtaatgaatttatgagtcagtaacctttatacaagccccacacatgctcacaaacaaatgccaagtgatctcaagcagtccaggaaatgggaagtatctccttggggaaccactgcagtggtatgtttggaagaacaagctgcataacttgaatggattttgggggctggaaaggctgtatgtgagacagaagtagaaaaaggagaagtgttgatgaggaagcagtcagggaagagccctcccaggtgaggaaaaataggctaaggagtccatttgtgttatgggagacaactcaaagctgctccaagccaaataagggttttgttttttgtggtttcttttttgagatgcagtcttactctgttgcccaggctagagtgcagtggtgcagtcttggcttactgcaacctctgtctcctgggttcaagcgattctcccacctcagcctccccaagtagctgggattataggcaccggccaccatgcctggctaattttttttttttttttttttagtagagttggggtttcaccatgttggccaggctggtctcgaactcctggcctcaagtgatctgcccacctcagcctcctaaagtactgggattacaggcttgagccaccacgtccggccccaagtaagttttgtttggctcaaaaaaagtcttttttgtttgctttgaaaaacaatttttttttttcagacagagtctcactctgtcgcccaggctggagtgcagtggcacaatctcagctcactgtaccctctgcctccccggttcaaacaattctcctgcctcagcctcccgagtagctgggattacaggcgctcgccaccacgcccggctaatttttctttatttttagtagagacagggtttcaccattttggccaggctggtcttaaactcctgacctcgtgatccacccgcctcggcctcccaaagtgctgggattacaggcatgagccactgcgcccggctgaaaagcaaaattttaataaaaatcctgatgtttggttttcttgcaagatcaccagatccagcaatgttgtgccccagttcctgtgtgtcagcagttggctagaggtcaggaattagtgcctttttttttttttttttttttttttgagacagagtcttactctgtcacccaggctggagtgcagtggtgctatctcggctcactgcaacctctgcctcccgggttcaagccattctcctgcttcagcctcctaagtagctgggattacaggctcccaccaccacacctggctaatttttgtttttgtttttttcttttttccgagatggagtcttgctctgtcgcccaggctgcagtgtggtggcgtgatcttggctcactgcaacctctgcctcccgggttcaagcagttctcctgcctcagcctcccaagtagctggtgttacaggcatctgccaccacacctggctaatttttgtatttttagtagagacggggtttcaccatactggccagcctggtcttgaattcctgacctcgtgatctgcccgccttcgcctcccaaagtgctgagattacaggcatgagccactgtgcccagccctaattttcacatttttagtagagatggggtttcaacatgttggccaggctggtcttgaactcctgacctcaagtgatccacccaccttggcctcccaaagtgctgggattacagacgtgagccactgcacctggccctatgagttccttttttctgtggaaggtaccatcttcatttgactatgcccatcaaaatttttcctggccagacacgatggttcaaacctgtaatcccagcactttgggaggccaaatcgagtagatctcttgatcccaggagttcgagagcagcctggccaacatggtgagacccccgtctctacaaaatataaaaaaattagctgggtgtggtggtgtattcctgtagtcccagctacttggggaattgaagtgggaggacctttctcctcccgaaaggtggaggttgcaaatgacctgagataacaccaccacactccatccaccttgggtaatagagtaagactctgttttgtttgtttgtttgtttgtttgtttgtttgtttgttttgagacagagtcccgctctgtcatccaggctggagtgcagtggcgccatctcggcttactgcaagctccgcctcccgggttcatgccattctgctgcctcagcctgccaaatagctgggactacaggcgcccaccaccacgcccggctaactttttgtatttttagtagagacggggtttcaccgtgttagccaggatgggctcgatctcctgacctcgtgatctacccgcctcggcctcccaaagtgctgggattacaggtatgagccactgtgcctggcctgagtaagaccctgtttcaaagaaaaaaaattttttccttttgctttctagttggagaccaactaaaccaagcctgtatttaagagcatatggttgaaagattaactctggaagcagatggacatcagtttgaatccctatttgcctcttcttaaccgcgtgactgggccgggcgtgctggctcacgcctgtaatcccagcactctgggaggctgaggcaggcagatcacaaggtcaggagatcgccaccatcctggctaacacggtgaaaccccgtctctactaaaaatataaaaaattagctgggcatggtggcaggtgcctgtagtcacagctactcgggaggctgaggcaggagaatggcgtgaacccaggaggcagaggttgcaatgagccgagatcgtgccactgcactccagcctgggcgacagagcgagactccttctcaaaaaaaaaacagaacaaaactgtgtggcttatgcaagtcactagaactctctgagcttgtttttccacctgtaaaatgaagataatactatttactttacagacttgtatgataagatgaagtataagaagcccagcatagtatttggcatgtagtacgtgctcagtaaacacgtaaataaaaataagtaggccagctatggtggctcatgccttttttaatcccagcacttcgggaggctgatgaaggaggattgcttgagcccaggagttcgagacctggttaacatagggaaacacaccatctttttttttttttgagacagagtctcgctgtgtcacccaggctggagtgcagtggcacgatctcaactgactgcaacctccacctcctgggttcaagcgattctcctgcctcagcctcccgagtagagtagctgggactacaggcatgtgccatcatacccggctaatttttgtatttttagtagagactgggtttcgccatgttggccaggctggtctcgaatgcctgacctcaagtgatctgcccacctcagcctcccaaagtgctgggattacaggcgtgagccaccatgcccggccgaccccatctcttaaaaaaagaaaaaaaaaaaaagaaaagaaaagaaaaaaggataggtaggtgtggtggcatgtgctggtagccctggctactcagcgggaggcagaggtgggaggatcacttgagcccaggaggccaaggctacagtcagctgtgatcataccattgcattcccacctgggtgactaagtgagatcctgcctcaaaataaagtaagtaactaagtaagtaaactttaatgtctttttactgagttaaaagcacaaagtacccaattcccttcgtcagggttttcatcacatagcccaaacatatcaccttggggtgtagtgtcttcctttatccctgaagaatatgagacctgttcatcatttgtcttcctattccacaggcaggcccaatgccgaaacacattgcattcataatggacgggaaccgtcgctatgccaagaagtgccaggtggagcggcaggaaggccactcacagggcttcaacaagctagctgaggtgggtgtgtatggcagagcccaaagtgaacagtctgtggagaggtagattatagctagaaaaccaggctctgagtttgctgtggttggagagtgttttttgtatctgtctctgtgttttattgtttgcttgctagctatagatctcatcttgacattggccagacgtggttgcttttgcctctaatcccacactttgggaggccaaggcaggaggattgcttgagcccaggggttcaggactagcccgggtaacatagtcagaccctgtctctacaaaaaaatttaaaaattagccagacttgatggtgcacacctgtgcccccagctactcaggaggctgaggtgggaggactatctgagcccaggaagcttgaggctgcagtgaatagagattgtgcccctgtactctagcctgggtgacagagtgacaccatctcaagaaaaaaaaaatgacattaacaaagaagtaatcatccagtgaatgaccataaaatactggaaataagaacaaaattgcctcttcttattttaataaatcaatagtttatattttatgcctcatccaatccttattgtatgctctacgtgacttaacattaataaaattgcatctgtagcttcagtaaccttattttcacttaacattttggttttgtttatttgtttgagacagtctcactctgttgcccaggccagagtacagtgcatgatctctgctcacggcaacctccgcctcccgggttcaagtgattttctgcctcagcctcctgagtagttgagattgaacacccgtcaccatgtccaactaatttttttgtatttttagtagagatggggtttcaccatgttggccaggctggtctcgaactcctgacctcaggtgatccacccccttcagcctcccaaagtgctgggattacaggcatgagccactgcacccggccaacatttggggaggcattttttaaggtgtatatataagctttctatctgtatctttcaatgactgtagaacattttatcaagaggatctgatataatttaactgctccactattacttgacattacaataaacattataaatagtactgtttcagcctgggcaacatggtgagatcctgtctctacaaaacaaaaaaaaaaattagccaagcatgatggtgcatgcctgtggtcccagctacttacgagactgaggtggaaggatgacttgaaccctggaggttgaggctgcagtgagctgtgttcacgtcaccgcaatccaacctggtgacagagcaagaccttgtctaaaaaaaaaaagtactctttttggataaattcttagaagtgacatttctggacgaacattgagtgactactcattctgctttgccaaggctgaggggtttctcaggacacaggtctttcagtgctaaaactggtgaaagtccccggcaaaccaggacatcactctacacagaggtcatgaacattttatggtataatgcatgttataaattggaagacattaagtttaacaaaagaatggaatatgacaatcttggtgaaatttttaagaagaatggagggccgggcgcggtggcttacgcctgtaatcccagcactttgggaggctgaggtgcgcggatcatgaggtcaggagatcaagaccatcgtggctaacacggtgaaaccccatctctattaaaaatacaaaaagttagccgggcgtggtggcgggcacctgtagtcccagctactcgggaggctgaggcaggagaatggcatgaacccaggaggcggagcttacagtgagccaagattgtgccactgcactccgcctgggcaacagagtgagactccgtctcaaaaaaaataaataaataaaagaatggaaatatggtctgtagttcacaggtcccagtgtcctagcacagggacacagtttgatgccagggccgtgatatttttttccttgagtgaatggcagtgaggttctcaccagaaccttgtagaagtctttacgtttgttgactccagcttctcttttgtaactgagaggcagttttgcctaatgcttaggagcttgagctctggagtcactcagaattcattggcacccctgctttgtcactgtctggctttgtgacctgcagcgagttatgtagcttccctttgcctcagtttcttcatctataaaatggggttagcaatctctatctcagtagattatttgaagataaataagatggcacaatgaaaagcatgtagcacaggccctgacctaaaggaagtactcaaaaaattgaaacttgttattagcaactgtattgactgatgtcagtggtgggttccaacccagatgtgccatccacagtggctgccttgcaaggtctttagggcctgaggctattcaagtgtcaggttctcactggcaattttcctaagatgacagtagatttgtttgcttgtatgtttgttaaggggttagagaggcagctcttcagcttgtttcttctgttctgtttgaatgtcttctgttgtctacgtttaacctcccgctctccatctctcaacattgtcctccacctctcaacattgttctccacctttagtggtacaggattagagcagccccaaaggactaagttttcttctttttttttttttttgagacggagtgttgctctgtcacccaggctggggtgcagtggcgcgatctcagttcactgcaacctccgcctcccaggttcaagcgattctcctgcctcagcctcctgagtaactgggattacaggcctgcgccaccacacccggctaatttttgcatttttagtagagacggggtttcaccacgttggtcaggctggtcttgaactcctgacctcgtgatccgcctgccttggcctcccaaagtgctgggattataggtgtgagccaccacgcccggcctgtttttttttgagttgaagtctcactctgtagtctaggctggagtgcagtggtgagatctccactcactggttcaagcgattctcctgcctcagcctcccaagtagctgggaatacaggtgtgcgccaccgcacccagctaagtttctgtatttttagtagaaatggggtttcaccatgttggccaggctgggcttgaactcccaacctcaggtaatctgcccaccttggcctcccaaagtgctagggttataggagagacccaccacacccagccagtttcatttctttttgagttataatttcatatggtgaactgcacagattttaggttttgacaattgcatttatttatctaacccatacccctgtcaagatataggacatttcctgccgggctcagtagctcatgcctgtaatcccagcacttcgggaggccaaggcaggcaatcacctgaggtcaggagttcgagaccagcctggtcagcatggcgaaaccccatctctactaaaaatacaaaaagttagccagatgtggtggcacatgcctgtaggcccagctactcgggaggctgaggcaggagaatcacttgaacgtaggaggtggaggttgtagtgagccaagattgcaccactgcactccagcctgggtgacagagcaagactccagcttaaaaaaaaaaaaaaaaaaagatgtaggacatttccatctctccaaaaaaattccctggtgccccttctcaatcaacttctgttctacctcctccttttcctctctaggcaactaccgttctgatttctgtaactataaatttgtttttcccattctagaactccatataatggaatcagacagttgaggatttttgacatattcttcaactctgagcctgttttatcatttgtaaagtaggcatgaaaacagtagtgtcattttaaagtggttgttcaaagaatcaaatgaaattatgtgaaaaccctttgcaggctattaaatgctacacagctgtccagttgttgctttttttcttttaactcagcctctcaacctaccagaataatgaagttatgctgtgagtaataacaccttgtgtttttatattgttcgttagccaccttgtaagggatggattgtgatcccatattacaggtaaggagacttcaacctagagaaattaaatgatttgattccagtcacataagtgcatgctggagtcagggactagagcctatgtctttacactctcagtgcagagttctttcttgtagtgcacaatgccatcagcattcactaagatcacatttttcagtttcttcaatggtggttttctgcttatttgatgcattaattctgacataaacactgatgttatcctagcttcacccagctttggggaggagaaaagtctgtctcctatctccaactctgagtcaggaccaaaaagtatctcttatttccccttcccactcttccttgtatcctagctccttgccttctcccctctcagactctgcggtggtgtttgaacctgggcatcctagaggtgacagtctacgcattcagcattgagaacttcaaacgctccaagagtgaggtagacgggcttatggatctggcccggcagaagttcagccgcttgatggaagaaaagtaagatgctatcagaggggagagcatgttcttccaccacccccagccttatcctaacccttgaaattctgttatctgaggcttacttaagggacttgcaactctttttaatgttagttagatatcttgggtggcaaatatcagaaatacaagatagtctttcattctttatttctaactttttaataaaaaagggggcatttatttgaggatattgaggggtgtcacatgatttaagaacaagtacagccagcctcaagcaaaactgaaaccaggaattaaacccactaggtagaacctctgtattcatttatttccacctctctctgcagaccagttttctcttgcttcaaaagagcagcctggaatcaataaaatcccttaattgggatccctaaattctatcagatttctaccccagagccaataaactatggccaaggaagtggagttaaagaaaacattgaggaagtcattttctgctgcacagtgaaccctaaaaagttactgtactccccctgcatagtcttttgggagggataggatgatgcataagagacatttatggggaagcatcagtaccattcttagctgtcagtaagtttaggcttaacttagggaataaagccagagaggggcaaagacaaatttcagtggagactgcttgcttcaaagtatggagcccttaccagccagaattgcccgaaagtcttagttacaactgttgtgtgcccagctcctacctgtaccaggaagatgagagaacagtgagcctagaactccagtgaagatgagcctagaacaatgggtggtagggagggtagccaggcttccttctgtctatattaggatggtgagactctgggctacagacattgctccccggtccccagcagagcctgtgtggctcagagtttacacctaaggagccggggatggaggcatggggggcatatcccactaatcttacctttttaaagtgtttactatatgccaggctttgagcctaaaatatattcttactcatcctgtaatcacattataccatgacaaagatattattagccaatttttagagagaaggaaagtagttaaccaaagaagttaaggcatatatcctgggtcacacagctatcagacaggcagagccaaggtgcacacctggatctttttgactccagagctgagctatcatctactacactgtgctctgagagacagaccatattacaattcctgcaagatcaaaacgcatggcagaagagatgctaatgagattgcgctgatcagttagtagtagagaaaatggtcttcgtttatcatgaagtcctggcaaaagcaagaagaaactcagaggtgcttttccattaatgtgccacagaaccccaaggtctgaggaggtgtagaaagaacctagtgggaatggggtagggggtgctgagttgcatttacctattttatgtgttgggcttctgtgtagaatttgatttgaagaaagggttctttggctaaaagaaggtgggaaaaccactggcctgattctgtttcatcagttgggaaactaaaccctagtaaagagaagaggttgagcaaggtggctcatgcctgtaatctcagcactttgggaagccaaggagggtacattgcttgagtccaggaatttgcttgattccagcctaggcaacatggcaaaaccccatctctacaaaaaaatacaaaaaaattaactggggatggtggcacatgcctataatcccagctatgtgggaggctgaagtggggggatcactgtgatgagcctggggagtctgaggctgcaatgagctgtgatcgatccactatgctccatcctgtgcaacagatcgagaccctgtctcagaaaaaataattaaaaataagtaaattaaaattttaaaaaacagaagacaagagcttacacatggtcacacatcaaactagtggcagaactataccacaagctagcaggaggagctgaatcaaggtcttctagtatactgccttcaattaatctcccattttccaaatgtgaagcattcggtttcttcatagcatttccagatgagagaagctggctgaattcattctcactgtatgcagagtttgggagttattgtatggaagcaatataatgtcataattaagaagacaagctctggaggctgactccctacgtgcaaatcctggttctccatcagctgtccaaacaaattacctaacgtccctgtgcctcagtttcctcatctgtaaaaggggaataataagggtatataactcagaggttggtgtaaggatggaatgtgttggtacatgtaaagcacttagaccaatatctggcatttagtaaacatagaatgttagctgtcaccattatcataatatttcactagaacataacaaaagtaccccataatacagctccttcccttgaggagtttactcacttctcaaatgggacaaacttcacagatacataaaatgcaactgcccaaaaaggacacatgaggtcgtgtaatgtatagtaaagagtttgggttcttgctggacatggtggctcacacctgtaatcctagcactttgggaggctcaggcaggaggatcacttgaggccaggagtttgagaccaccttgggcaacatagtgagacctcatctttacaaaaaatacaaaaattagccaggcatggtggtgcatgcctttagtcccagctacttgggaggctgaggcaggaggatcgcttgagcccaggatttggaagttaacactgaaccatgagtataccactgcactccagcctgggtgagagtaagaccctgtctccaaaaaaggggaaaaaaaaatgtagtttggggctgagcgcagtggctcatgcctgtaatctcagcacttgggaggccgagacaggcagatcacttgaggtcaagggttcgagaccagcctggccaacatggtgaaacctcatctctactaaaaatataaaaattagccaggcctggtggtgggcacctgtaatcccagctacttgggaggctgcggtgggaggatcgcttaaacccgggatgcggaggttgcagtgagctgagattgcgccactgcactccagcctgggtgacagagcaagcctccatctcaagaaaaagaatttgggttctcaaatcagacaaactgggtttcaatcctgacaaagcacttgatggctatatgaccctgggcagtccctatctgactgtcctgtctgagccttggcactgaagtaagtttctttcagagttgttgaagggatgcaatgaaataatgcatgtagaacagggtctgacacacaggaaagcactcaaaaaactggtggtcagttattacctgagcaccttgctctctccagctcagcaggggccctatcccaatgctgcctcttttccctgatcagggagaaactgcagaagcatggggtgtgtatccgggtcctgggcgatctgcacttgttgcccttggatctccaggagctgattgcacaagctgtacaggccacgaagaactacaacaagtaagttctcagatttccctatagggagctgtttcaatctttgattccctgctggctttagggagacgtcctgggctttccttggtctggattggtgcaaggggcaatgagagagtaggttgagcagcttagagactttctccgtctgcagggcacaccagacatgattctgcaataacatgttatatgtgtgtatactgacacatacacatagtttctctttcctcctttctctgcccagcccccaccaaataagtgtgtgtgtgtgtgtgtgtgggtgtgtttttacttgacagggaatgggatcggaatacagcagttcttatccctgactttgaagacagatccttcaagaaattcttgttctgttccactcctttaacctatggataggatgaccttgggaggtcatacagatgtacaggggaatagagttcaataatccaaactctgtgatgtgtagctttgaaatataacgtgtattttggcagtggacttgttttacatcaaatctccttcctattttcctttgtttgtgccaatatcacagtagagtcttcctctgaaagccggtgtacagtagaaggggagagggttaggacggcaataggagctatttggtggctgggcacagtggctcacgcctgtcatcctaggcaggtggatcacctgaagtcaggagttcaagactagcctggccaacatggtgaaaccccatctctactaaaaatacaaaaattagccaggtgtggtggtgtgcacctgtaatcccagctactcgggaggctgaggcagaagaatcgcttgaacccaggaggcagaggttgcagtgagtcgagatcacgccattgcacttcagcctgggcgacaagagcaaaactctgtctcaaaaaaaaaaggagccatttagtatttgtcttattataaaactagttacatgtttattccaagaaaacttggaaaccacaaaaaactcataatttcacctttcagaggtatccacaattaacatttgatgtgtatttgtttttctagggaaaggctggaagggcttctctgtaatcagtgacttcaatcatcagtccctgtccccctttggtaaattattctcttcttccctcctcaggtgtttcctgaatgtctgttttgcatacacatcccgtcatgagatcagcaatgctgtgagagagatggcctggggggtggagcaaggcctgttggatcccaggtatcccgagttgttttgcatggtaattgttaaggaaaacaggcctgggccagcatggcagctcacgcctgtaatcctagcacattaggaggccgaggtgggcagtccacttgaggcaggccaggagttcaagaccagcctggccaacatggcaaaactccctcttttcaacaacaacaacaaaaaagcaggcctgtaccaaaccataaagcccctctgtgccatgtacttggccagaggtctaattaggggagcatgtggaaagatttaaggggatctcccaaatttagagattaggattggcttattacaacctgcttcagaactagagttcaccacacaccaagaaaccccagagaaagagcaaagcagatgacaaagccatgttattattcctttacaaattataccctcctggccctttggtagtgtttttccaagaatgacttttcatgaatgcagtttgttggggctagagttctttaggtctctcatgttctagttccacacaagattcaggtgtttttcttttcttttttttttttttttttggtgaggcaaagtctcactctgttgcccaggctggagttgcaacctccacctcccaggttcaagcaattcttccgcctcagcctcccaagcagctgggactacaggtgcatgccaccatgcccagctaatttttgtattttcagtcgagacaggtttcaccatattggccaggctagtctcgaactcctgacgtcgtgatctgcctgcctcagcctcccaaagtgctgggattacaggcgtgagtcaccatgcccagccgattcagggatttttcaaaaagaaaattattaattattgtcaacatagtggaatcctaattattaaaggtggagagacttttgaagccatttaaatatttggtccctctcatgttattatttatgtaacttttaatatatttgtaaactaacagcaatagtaaaataatagtagcaaaaaataacccaggagatgtgttgtgttctgtatttcattaagtcattaaccttatgtgtgagagattcaaggctgttgtccattgtgtagatgagaaaactgagttcagcattgaagtgacttgcccagggtcactctactagtaagtgccagagctgggactcatatctaaagctgtttgattttagggttcttatcctttacctctattatgtgggatcttgggaagcaggaatttttctggttcccttcccgattcgattgacctaggaaactagattaaaaatcaaaaagttacttggtgagaatagaattagataaaaaggagaggagacagtttttgaggctattttatgaatgcctctccttcctaacagctgggtgacatttctctgtcacatagttcattcattcaacaaatattttatttttatttatttatttttattttttattttatttatttttttgagatggagtctcgctctgtctccaggctggagtgcaatggcgagatcttggctcactgcaacctccgcttcccaggttccagcaattcttccacctcagcttcccaagtagctgggattacaggcgcccaccaccgtgcccagctaattttttgtattttttagtagagacggggtttcaccatgttggcgaggctggtcttgaactcccaacctcaagtgatctgtctgcctcagcctcccaaagtgctgagattccaggcatgagccatcactcctggcccatttttatttttattttgagacagggactcactctatcgcccaggctggcgtgcagtggtgtgatctcggcccactgtagtctgtgcctcccgggcccaagcagtcctcccacttcagccttccaagtagctgggactacaggtgtgtgccaccatgctcagctaattctttttttggagacagagtctcactcttgcccaggctggaatgcaatggtacaatctcggctcactgcaacctccgcctcctgggctcaagcgattcttctgcctcagcctcctgagtagctgggattacaggggcatgccaccatgcccagctaatttttgtatttttagtagagacggggtttcactatgttggccaggctggtctcaaactccccacctcaggtaatccgcccacctcggcctcccaaagtgctgggattacaggcgtgagccaccgcgcccggcggttttagacttacgttacagtggatagtggtgcccttcaccatgctaggtaaccctgagagaaaatccagttgaaaagggtcagcagtttggttttggatatcctgtacatgttgaacagagatgtcaggtcaacagttcagcgagggattggtatagtcaggtcaacagtcagacagagatgtcaggtcaacagttcagacagggtttatctctgtcgccagtatggaagccatctgtgtataggttaacttgagcaaagaggggatgagaaagctaaggagagtctgtctgtctatctgtgtatttatctatttagagatggtctcacactgtctcctgggctggagtgcagtggggcaatcaaagctcactgaagcttggaactcctggtctcaaaggagcctctcaagtacccagtactacagacgtgcaccacctacccagctaactttttatatttattttttgtaaaaacagggtctgactttgttgcccaggatggtcttgaactcctggcctcaagtggtcttcttgccctggcctcccaaaatgctgagattacaggtgtgagccactcagccctgcctgttaaggagtgtagagtgagaagaagaaagagcctaagatggcatttttgaggaactctaccctttactggctgggtagaggagaataagctttataagcaaaaacacagaaaagcaggaagaaaaccagggcagccagcattacataagccaagaaaagagggagtttgttggtgcaagttgggaaggggtagggcacccatggaaacaatggtgtcaaatgctgtagagaggtcaattaagatgtagagtgaaaatcagctgttgttaaaacaattaagagactggtggagttagcagaggtagagagcaggcaggaagatgagacagaaaaggggtatagaaatagaagcatgttttcaataaaattcttagtttggaggtactttcgtagttcattatatttttgtgctttataatgaatatgtttcaaatattcttgtatgtatgaaataaatattaaggcacaagggttgacactagaatgaaagaaagccatttgacaagcagatctaatatgcattatgcctaggactctgatcttgactcctagtccagcatgctttaccctcataccacattacagtaaccactaccttatctcctgcttcttgtccagcaagtttttccatatccttctctgtcctgcatggtttagtaacttgcctctgtggggttagttatgcagacagggtgtgggttgggcagtatcaccagggtcaggaggccaatgtctcaacccaccaactcctgaagcttggtgtgctcagactgggctaatcagggcctgaggcgttacactttatattattcgaatttagacaaacctgcatttataacaaagtcagtgcgttaattacaattaggtcctatgcttctaatagctggaattttcctgatttctcactatcaccatccaactcctcatttttctttcttccagggtatgtatgtagatgtgtgtgtgtgtgtgtgtgtgtgtgtgtgtgtgtgtgtgtgtgtgtatttttgtttttttgtttttctgagatggagtcttgctctgttgcccagggtgaagtgcagtggcacgctctcaactcactgcaacctccaccttataggttcaagcagttttcgtgcttcagcctcctgagtagccaggattataggtgcacaccaccacacccggctatttttttttctttttttttttttttgagacagagtctcgctctgtcgcccaggctggagtgcagtggcacaatctcagctcactacaacctctgcctcccgggttcacgccattctcctgcctcagcctcctgagtaactgggactacaggcgcctgccaccccgcctggctaatttttttatatttttagtagagacgggtttcaccatgttagccaggatggtctcgatctcctgacctcgtgatctgcctgcctcggcctcccaaagtgctgggatcacacccggctattttttgtatatttagtagagatgggatttcaccatgttgaccaggctgatctcgaactcctgacctcaagtgatctgcccaccttggcctcccaaagtcctgggattataggtgtgagccatagcacctggcctgtttcgttttgtttttgagacagggtttcactctgttgctgaggctgaagtgcagtggtatgaacatggctcactgcagcctagacctcctgggctcaagagatccttccacctcagcttcctgagtatctgggaccacagatactgctaccacatctggctaattttttgactttgtagagacagggtcttgccatgttgtccaggctggtctcaaactcctgggctcaagtgatcctcctgccttggcctcccaaagtgctgggattacaggtttgaaccacggcacctgaccgaggtatatatgtatttttttagcagttaaattaatagattgttttgtgagtctggaaattatagaagaaggaagtagattgagaccaaaggatagttaataaattctattccaccgtgttaccttgaacgggctacttgattccctgtaggcctctgtctttcttataaaacaatagtgttaatagtaattgctaacacttactgagcatttactctgttccaagcattaagtattccacatacatttatccttagaccctataaggtagatactgtttttatgcccattttaaagatgagaatactgagacatggagaggaaaagtaacttgtgcaagttcacatagttggcaaacctgggggccaagatttcaacctggcttcagagcctgtgttctcattcactgtggcatattgacttcctcatagcaaagctgaaatgaacaataaggcagtaaaaaagaaaaaaattagatggacatggtgacttatgcctgtaatcccaggactttgggaggctgaggcaggaaaatcgcttgagccctggagtttgagaccagccctggcaacacggcaagaccctgtctctacaaaaataaaacagttagctgggtgtgctggcacacacctgtagctacttgggaggctgagtgaggaggattacttgagcctagcaggtcgaggctgcaatgagctatggttgcgccattgctctctagcctgaacaacagagtgaaaccctgtctgaaacacacacacacacacacacacacacacactcacttttgacataaatatttataacacatgaaatcacataatgaatagtttacactctgaatcatgcttttatcattcaatgttacgagtacttttcatgacccgtgtttttaataattcttcatatcattatttataatggctgtaaaatatatcttgtgttaatttctttaaccagtcttctatttgttgggtatataggcagtttaatatttcattattacaaataatgccacaattaaatctttgactgaacttgcctgcattttttattgtttcctcaggatctgagtttgaaagtgctcatttcaccttattcttgccaagattttttaaatgtaaactgttctgaccaggtgcagtggctcatacctgtaatccagcactttaggtggctgaggcaggttggatcgcttgagctcataagttcgagaccagcctgggcaaaatggtaaaatctcgtctctaaaagtacaaaaattacctgagtgtggtggcatgcacctatagtcacagctacttgggaggctgaggtggaaggatggcttgagcccaggaggctgaggctgcagtgagccaagatcacatcactgcactccagtctgggtaacagccagatcctgtctcaaaaaataaaacaaaaaaataaacctattctcataggtaaaaactgatattttaccgttatttaatgtaaatcatttccgaaaagtcttcacgtagacagctttaactcaccattccatttagtgatggatttttgttggccaaagtctacagatgttccattttgattttgtcagtttcatctttccaccctagagttaacccctttttttttgtttttgagatggagtcttgctctgtcacccaggctggagtgcagtggtgcaatctcggctcactacaagctccgcctcccgggttcacgccattctcctgcctcagcctcccgagtagctgggactacaggcgcccaccaccacgcccggctaattttttgtatttttagtagagacagggtttcatcgtgttagccaggatggtctcgacctcctgacctcatgatctgcccgcctcggcctcccaaagtgctgggattacaggcgtgagccaccgcgcctggccaacccctttgtttttttgagacacagtctgctgtatcactcaggctggaatgcactggcacaatatcagctttttccattaagaattctgcccactgcagaattcttactgcatacctactgcctaaagtaggtagaagaaactctttgcagataaattgtaaactcagagagactgagtctctgaagtcacactgcaagttggtgggactgaaaataattttttattattattctttatatagcactttatagttcccaaagtgcactcaaatctattatttcatttgatttgaccctcatgataacctataaggtggataggacaaatgggccctgtttttttttttcccttttaattacatttattttaatgctgaatttactcctgtgccataagtttttgtttcttcagtttctttgggatatcattttcttctgggcaacctcctcttctggtttaggaacaatctgttccttttcagtaaggatcatctcaatgtggcagggagagctcatggatgggttaatccaaccatgagctctgtaggtccagcggcacatcttaggtgctttgttcacttggatatgctcaatgaccagagaatctacatttaaacccttaagttcagcattactctctgcatttttaagcatgtgcagcaaaaattcagcactctttttgggccactgaccttgtgtccagccccactgcttggcctgggcacacctgccagctccaccattgtaacgtcggaatggtacgcactgtttctgtaaagtgacatctttcaggtacttcatggcttttcgtatatgcatacccttgatggcctgggcagtttcacgaatattcttaaagtaaacacgaagattggaacctcttgatttgcatgatatcatgaggttctccgggttaagtgaatagtgaaccattttcacagattacctcaggccgcttagggaaagagcaaatgggcccattttaaagataagagaatgagaaattatatggattgtacagagtctcacataacttggagaattaagaccatgctgccaagacaagattgtcagattaccagagaaatctgaaccagagcccttcttattgctcaattataagtgaatactgtttcctctgtgatgatgatacggaaaagaaagctctctctgtggtttgccttaaaggactgagagagatgagcaacttggctgggtgcagtggctcacacctgtaatcccagcactttgggaggccgaggcaggcagatcacttgagctcaggaattcaagaccagcctggccaacatggtaaaaccccgtctttactcaaagtacaaaaattagccgggtgtggtggtggctgcctgtagtcccagctacttgggaggctgaggcaagagaatcacttgaacccgagaggtggaggttgcgggagccaagattgcgccactgcactccagcctgggtgacagcgcaagactccatctccaaaaaaaagatgaataacttgcctaaagacacacaactagtaagtgtagagtctggttttgaacactcagcccagatctttctgctttcctgaccatgcgtccagaaacatgttcccaccaagaaatttttgtcttctggaccctttccaagatgtaactctaactacctggacattctgaattctgcttctgggtagttggtaggacaggtaaacagcattcttggagccaacagacaccagccatgcaaataccctctttctgtggacaggatagttttacttaagataaatgcttccactcaccagttttcttcaattctatctcctttctgaccatctctgtgcttgggaaagtagctcttatcaaacacaggagaactgatcatattgctgtttatttaaaatccggtgtaatgtggaatttttgcaatgtttcaggatccatatgacttaaataagattttaaaaataaattagctgagcatggtgttgcacacctgtggtcctagctacttgggaagctgaggtaggaggattgcttgagcatggaaggtggaggttgcagtgagctgagatcacaccactgcactccagtctgggcaacagagggagaccctgtctggaaaaaaaataaaatatgttttctgtttttttttgttttgagacagagcctcgctctgtcactcaggctggagttcagtggcataatctgggcttactgtaacctccacctcctgggttcaagcgattctcctgcttcagcctcccaagtagctgggactacaggcatgcggcaccacacccagctaatttttgtacttttggtagagatggggtttcaccttgttggccaggctggtctcaaactcctgatcgcaggtgatctgcctgcctcagcctcccaaagtactgggattacaggcatgagtcaccacgcctggccaaaaaaagttatttacataaattcaaacaataacagaagtacataaagtaaaaagaaatagtcttttcttccttacttcttatccaatccactgttaatagtatgatgtatctttttagactttgttctttatgtatacttatatgcacgtgtgaatgtttgaatgtgtgtgtatgttttatactatatattctctgaaacttgccttttacatttaacattagattttggacatctttccaaatcagtgcatttagatttatctttatttttagaatgcagttgcatagtatttcatcaaatactgggccataggatgtatgtatgtattttaaaaaacaagatgtttttagcaaaagacaacagatatttttgtgggtgcatctggttttaggcctgaggctaaatgactttcagcaaattattcatctttgagcctcagtttccttatctataaaatgaggatagaaataccttatgtatctgctgagcatggtggctcatgcctgtaatcccagcactttcagaggccgaggggggggcggatcacgaggtcaggagatcgagtccatcctggctaacatggtgaaaccctgtctctactaaaaatacaaaaaaaaaaaaaaacaaattagcagggtgtggtggcgggcacctgtagtcccagctactcgggaggctgaggcagaatggcatgaacctgggaggcagagtttgcagtgagccgagatcgtgccactgcactccagcctggggaacagtgtgagactctatctcaaataaataaataaataaataaataccttatgtatcagaacatgtcaaaaaaggcaaaaaataaaaaagagaaaagaattttacattgtattctctaaaaaaaaaaaaaaaaaagaaataccttatgtagttgtgaagatttaaattcattcattaatttagcaaacattttttgagggccttctgtgtagtattggctagtgtatttgatggtattgtataaactgagaagcctatatatggaagttcaccatgagaacactacagaaagagaatactacaggatgtgtgcctctctttgtctcttcttgctcatcttagtgatatctctgagtctctgcttgataagtgcctctataccaaccgctctcctcatcctgacatcttgatacggacttctggagaagtgcggctgagtgacttcttgctatggcaggtaggtcatttccaagtactattatgtttgtgtcatggggaaaccaactgtatccacagaatggatcagagtggtccatccccactcccaaacaggctggggccagagtacttctggggaaagctaaaatctggagaagcatctctaggctgtgtctcataatatttgatgtccattcctcatctgtcgctggctttgcgaatccaactatagtgaaaacttcattgtgccgcttttcaaggaatgggacttctgtcttgcatccctgagcgtaagctcttgccttggtaacctgccagggaccctagcccctctgggttggaagcttgccttgcagttactagtccctccccttcaggataaagggccatacctatgcaagcatggtaaacaatatgcaaacactcaagtctctatcccctgttaacttggtccctggagagcacataactaggggaagtccttgttctgggagagactccatttggaagcagctcacatgataaagctccagaaattttaatggaccacaatcttaaaagtgagctaacgcagggcgtggtggctcacgcctgtaatcctagcactttgggaggctgaggcaggcagatcacttgaggtcaggagtttgagaccagtccagccaacatggtgaacccctgtctctactaaaaatacagaaattagcctggcatggtggcaggtgcctgtagtcccagctacttaggtgaatgaggtgggagaatcacttgaacctaggaggcagaggttgcagtgaggcgagatcgtgccactgcactccagcctgggcaacagagtgagactctgtcgcaaaaaaaaaaaaaaaaaaagaaaagaaataagtacaatgtgcacctattggttctgtggcccactgtgctgctcagatcacgtttgggaagtttactgatgggctgaattttaagagactacagagtcagttactcagtgtacagaattagttacattgacaaacttgaggacttactggaagaggccaaactggaaagcaaggaatctcatgtcttacaaaaaatgaggaaaggatagtggtctgcaaaagggaaataagtgacaatgtattcccttggaaaaaagtgttgagttccttctttatgctggaaatatggcagtgagtgagtcagaaatgatccctactgtcttgaaacttatagtttgctagcaaagacaaactctgaacaagtcattacaactttgggaactgataacaggcagctctaatctagccttgaaatacttgaaagaatgtcactttgaagaagaaacaaacttgttccagaaaaaatacctgggaccttagtagaagttgtagggaaggtgacattggtttagcataaaaagccaaacaggctatcggacaactagttatcccccatgaggtactgaattcctcaccactagagatatcaggcagtggctgtcaagagtgttccaaaggggattcttcatcagtgattattattaaagtacacctggctctttgctatgcatatgttatctcatttaatctaaacagtaccctgaaaattaggtattcctattatccagttttacatttgaggaatctcaggccaggtgaaattacccctgctcaaataaatggtaaatggttggagccaaaattcaaagccaggcagtctggctccagagctcatgctctcaaccactgtgccctgctgctggtacttaaaaataacaatggcagctaccatttgttcattggtgacctttatcagacagtatgtcttccagatgccctctaagggccaagagccaataacataatccagatgttatttcatagtcctaaaattggctcttagaaaaatcctggtggaaatgttgatctagtctcgttttagttctgctttaccacaggcaggtgatctggctgcctcaagtgacgcctccccctactagtgaatgaatcagggccagcagcagctgcagctacagctcaggatgcctgtaacattgtcatctctgggcttctgggtcctgcttagcctgctttttccctggaggactgaccagggatgcggcccagcaacatgttactaaatcatactctcctccctacctttcccagacctctcactcctgcctggtgttccaacccgttctgtggccagagtatacattttggaacctcttcgaggccatcctgcagttccagatgaaccatagcgtgcttcaggtaagaaagagttcagggctggccagatgggatgggatggaagaaaagattagcattgattgacaaccaccttactatataccaggcacttcctaataagatgatgataatgatgatagtagctaccacctactgagtatctactacttgtcaggcactgcgaacattttacatgctgcaactcatttaatgttcccaagaacccaatgagggaagtcttattagcccctcccttatgtaagtaagcaaacagaaatgatttagttaaggacacataatcagtaagaggtaggaataggatttgagctacaggtcttttatcttttaaagactcaggaggaaaaggcttctcagagaaactggccattattcctttaaagtattaccctaataaaagatcgtagcagtagggattaagaactaaatagcattgtctttccattgtgtaaacctatgttgtgtcaagacttgaagtttgactttcagttttcatcaccaaatcttgaaacaggttttattagcagtcacctgtatatgattaggtctctttataataatggtagtggtagctaacatatgaggatctacgagggcacttaggtgatttcatgtaagttttcttatttaacctaacaacccagcagttttggtgtcctcatttttcatatatggaaccagaggggcagagagacttaagtaactgtcccaaggaacctgaattttatctttatttatttatttattttgagatggggttttgctcttgttgcccaggccggagtgcagtggtgcgatctgggctcactgcaacctccccctcctgggtttgaacgattctcctgtctcagcctcccaactagctgggattacaggcacacgccaccatgcctggctaatttttgtattttcagtagagacagtgtttcaccatgttggccaggctggtcttgaactcctgacctcaggtgatccgcccaccttggcctcccaaagtgctgggattacaggcgtgaagagcctgaattttaaaatcaaagctggtgctgcttcttcagtctggagagataatgccaggaggaaataatgatgtgagtcagggattcttaatctccttggtattggggtccctttgaataatctaatgaaagccacagaccatctccctagaaaaatcgcagatcactcaaatgtggaattttgcatagaattgtaaacttatcatggaaacacatagaatactttttttttttttttttttgagacggagtttcgctcttgcggcccaggctggagtgcaatggcgcaatctcggctcaccgaaacctccgcctcccgggttcaagtgattctcctgcctcaccctcccgagtagctgggattacaggcatgcgccaccaatcccaactaattttgtatttttaatagagatggggtttctccatgttggtcaggctggtcttgaactctttacctcaggtgatccgcccgccttggcttcccaaagtgatgggattacaggcatgagccaccaagcccggccacacatagaatactttaagggggttcacataactgctgaaatctgcccctgaatcccaagtccataactcctgctataagtaaatcaaatcacaaagacttgatcatgtatttaattacttagtctcagaatatgaggaaattaaaagaagtttagaattagtgaaaagaaaaacagcaaaggcacaattatccactgtcagtggggaatgaatatcagatttttccatatgaccaaagctccctctaaaaactaaaactttacccttttttgatggaaaaatttctaaaatgtatcttgtacataattcattgaaatctatataccaggcacttgctaataatgatgatgattaggataatcacgtgctattttttgtttttttttttttttagcagggtctcactctgttgcccaggctggagtgcagttgtgcaactttggcttacttcagcctcccaagtagctaggactatgggcacacaccaccatgcctggctgatttttgttattttttgtagagataagtcctcactatgttgcccaggctggtcttgaactcttaagctcaagtgatcctcctgcttcggcctccccaggtgctaggattatagacatgagccaccatgcctggccgtcatattctaatgattatgataatagtaattatcatctttaaacacttcattgtacaacaatatccttgaggggtagggctgtttgctctaagttagatggtcccagaatacctgggtttgaggtttcatgtatatttttctgtgtcctccctctttcatttcctactgctgtcaacagttaattttgacagtatctctcctcttccatagtatttactgttttaaatcagctatagacaaggaaaccagatagtcaagcttgttggaattatgtatataaaatgagagtgaactggctctgcatgaagcccaaaggagcttggtgcatgagtttttgtgtttttacctctaattgggctgctcagaagtcttttatagtaatttcacgtttctcagatactttgcatatggttgtcagaggagttaactcaagtttcattcattccataagtatttattgagtagtatgaatcaggcactgtattaggcacaggagagtcaacaggtagccagagggacaagatctctacctttgtggaacttgtattcttgaggagacagaaataaacaagtaaacaaatatataagttccgattgtaataaggcagtgaagaatacagagtgatgtgctagaaagtaatgaagagaatgcaaagagactgaggttaaagtttgggtcttggaagaacaaaaaagaggtcaatgtgccaagggagaagggcaggaaatgaggctagagtcagaccttggctcatatagagccttgtaggtcatggtaacaaagctgaaggactttaatcaggggatgacgggatctgagttgcattttgtaaaaatcattcagaattttcaacgggctggagttaaagccaagagacagaactcctgcagtagtccaggtgagagaggatgcgcctcgaggtagggtggtggcagtagggaaggggaggagtgaagacgggataaaaacaaatgttgaaatagaaacaagtgaaactagctatatcaaggtgataatataactccccagagaaaggaattaattcagcttacctgaacacagttctctgctattcatctttagtggaatttcttttcaggataatacaaactgcaacacaaaattaaacattacttaagaggtttattgttagtggcaatgttggtaatgtaattatgaaactcttgtttctttttttttgaaatggagtttcgctcttgttgcccaggctggagtgcaatggcgtgatctcggctcactgcaacctccgcctcccaggttcaagcgattctcctgcctcagcctcccaagtggctgggattacaggcatgtgccaccacatctggctaattttatatttttagtagagatggggtttctccatgttggtcaggctggtctcaaacccccgacctcaggtgatctgcccgcctcggcctcccaaagtgctgggattacaggcgtgaaccaccgcgaccggcctgaaactcttgtttcttgtaggctaaaacaaataagtacaaataataatgttattaggaaccaagacacttaggttgtggccatagcaattggttgtatagttctgctgtttcctgggatggggtggaaggtgtttgaggtcaactattaagtgttccatttttacctatggatcatatttgcaaacttttttttttttttttttttttttgagacggaatctcactctgtcgctggagaacagtggcatgatctcggctcactgcaacctctgcctcccggattcaagcaattctcctgcctcagcctcccatgtagctgggactacaggcacgtgccaccacgcacaactaatttttgtatttttagtagagacagggtttcaccatgttggccaggctggtctcaaaatcctgacctcaggtgatccacccaccttggcctccgaaagtgctaggattacaggcatgagccgctgcgcccggcctatatttgcaaacttttattgagttcttaccacatgtcaggcatccttccagtattgagttcttaccacatgtcaggcatcctttcagtaaattctgtgaactgctttaaggcagatactattattattgcctctgtttttagagcaaggaatccaaagttataatagagatactgattatcttgaagccttctccagcaggagcccttggaggtcctggccaggctttctctaccccagaagcttcaaagctctgtttctagaaatcatatcaccttggcagatgcactaaggggagaatccagactaacagcatcctcaccagtttgttctcagaccagagaggtctttccaggcttttctcatgtctcccttttacagaccctgtatcatggccaaactggactcttcccagttacctgttccatgccctccagtttcctacctgtatgtctgtgctcttgccccatcacccaaattcccattttaaaatctgagctgctctgtctctaggccctgcccaatgtgtccctattctctgcaggaagccagggcaaggggctaggctctggacctagagtagcttactgagaggaaggcagcgggtggatcgtaagggaagcagggacttggctacaagttgtggggagccagaccttggtatctgaatggaccatgacagtctccaggtggtcacctagccagtcttaaaggctggcaaagggagatcttgactatgatgcagtaggacttgtcagcaaagaggcagggacaaatagagaatcaggccagggagggggtgtgcggcagtgcagagcagctgatcctcaatcacaagttgcatggatggtaggtccttgagaggtcactgatggagatgagtaaaaagtgttcacctcatctccaaggatgatattagagagggaaaagacacatgttcccacgaagcttcctgtagtacatttgtcacaatttaaacgggctggattgaacattatatttcttctgctcttcaggttgtcactatcttctcctcaggataaaagcttgagttatgtatgtatgcatatatgtatgcatgtggaaatggggtctcgccatgttgcccaggctggtcttgagcagctgggctcaagcgagcctcccaccttagcctaaaagcttgagttaatgtctcagacattcatgactttgaatattggcactgcctacatagctatatgactgtacagttacttaacccctcagagtatcattttcctcacctgtaaaatgagagaagtagcgtttacagtaatacctaccttgcaggtttgtgatagggattcagtaagctaacacatgtcaagtgctgagtgcagtggctggaacagagttcattttccaagaatggtggccaatattgttccccacatgtgtgtctcttggcctctcctcagactcctctctggaaaagcaccctgcacatcctgtccccagtacaactccccaggcaaggagactctgagggtgcttcagaacatcatgtttctggtaggaggtgcccttctctgcctgagagcagccctcagaaatgcattcctcatgctgctgacctgggctggctggttgcagcttggggaaggacttttcattggctaatgttttgaagccaaggacctgcagcctctctccaggtgccaacagagtggtagaggacttttagatttaagtactggagggactattacatcttgttctctgattctaccaaggagagaataagagcagagagggataatgcccaggaggaatttagattcataggttagaaccacatttctcaaagtgagcttcttggagcccttgcaccaagattggataaggtctgtacaaaaagtctctaaggaaagaattaacgccctcacttaccctgattggtcattatacaaggatagtagacaaatggtcagggagagaaaagttgacctctaggacttctgttagcttggatttcccaagggtaagtacttgagaagaactggaaacacctctgagattgaaagggtagattcagaccatgtggaagctggatagacaggtatccagatacaggccaccagcttttccacccctagaaagtagagcttatacacaggcacgagatacacttcacattgtcctctcaagaagttatcttagtggagaagccaagggaacttcagccatctcagcctcgctgtcattttctgtaaaatgacgagcagacaccctcccaactctgctatctgaacaatgaactgctaattcctggcagacaggggccaggctctgcctgggctacagcccccattgctggcatgcactctgatgccatctggaagaagcttgcgcctcatgaagtggctttagctagctccatatttcctccctctgttgctgagcgtcccccatcctttctgttctgccagaaacttagactacttagcccagtccacaagtggcggtgatagaacagctaacagttaatagccaagcagtaggctgaaaattcattatctcatttttcctcaaacaacccagtgaggtgggtactcttatcccggttttgcagagtaagagagagccttagagaggtgagggaggccttaggaacttctcaaaccccagtgctccaggtggacttactctggccttaacaggctcttcggttccatgcatctttgctcattactcccactgccagaatattctccctgccccccacacacctcacctctgtttgaatcctcctcattggttaaagggccagctcaaattctgtctgtccatgaaggtcactgctccgtgatgttcatcagccacacttgctttctcctctgaactgcatgacccttaccacatcctattttgcatcgtggcactctgtgtgcatggctgtacaatcagcctgtaagcacctggattgctgggatcgtgtcctgcgcatctccatatcctcaaaaaaaatcctgtatgtagcacccagggagcctcctgaccaaggcctggaagaagcccttccagcaagacggagagctctacggcaactgttcaagcccgaagtcctcatagctccacatgtaattcattgtaatagcagaagagaagtattcttgaatgcctgggattattcaggagccgggggggacagtccagaattctcatttgtcatccttattcatgcagtaaacctttattgctgagagacagcaaatcagttccctgctccatgtctgtctccagcagaaagtacctccctcacagctccattgtgagggtcaagtgaggcaacagatgaagtggttgtgcacatgtaagatattctttaaaccatgaagacagagcagtcaaggtgcttacaggctgattaggacaaaaacatgtatacaagtttatcgtaatacaaggtagaatgtgggaagggtcatcagggtataggataccataggaaaatagagtttctcacacatggaataggtttggcaggaggagctctagtgcaaaggctttgcaggtcagttagactggcaggaacagagaggatcagtgaggcacaggaaagccttggttctgctccaaagggattttccgctcttctgtatcaggagcatcctcactgctctcctgggatcacgtggtcagtcagttgagtgtttcacatgtacagggcaccccaagtgctggagaggaagaagcccagtctctgccctctagtacttgggatgataactgctgccagggagtatgatcaccacctggtgtcagagctggttgcaagaggcttgaaggctctcaaacttccaagggcttattttctaacagaaagagtggattgtgaacactaacacttattctactatgcagaatgcaataagtggcttaagagagttgaacctgcttctcagaatgttcataggggggtcatttgctggaaggatcaggctggtcttcatacaggaggcaagtctggagctctgaaaaatagcctagggagtggggaggatggtaccctcagaggaaaacctggggagatcaaaggaagtgacccaagggacatgtccccgacaagaataggacctttcttgcagcggagaatagacaataacaacttgtaaaattgctgtttctgtctaagagcctgctaatatcctagagaggattttgcatatgttatctctaatccttaaaaccactcttcaaggtaggcacaacccccactttacagatgaagaaatgaggttaggacaggatttgcccaaagacacaaagccagttgatgggggaatcagaagtcagacccacatttgtttggttccaagagcatgagaaaaactttaagaagtacagacgcttccacacaaaacaaaccaagatggacccagaattgccactgccctgcctgtacaacatgagcaccacccactgcatacctactcccaagccttttcaaatctggtacctactttccactgttccacttcacttggcccaccctgtgccccaccccctacctcctccatcccagtttcacccactcctaaaaatgatctccccaccccaatccccacttttctctagcagaaggcccgagacatgtatgcagaggagcggaagaggcagcagctggagagggaccaggctacagtgacagagcagctgctgcgagaggggctccaagccagtggggacgcccagctccgaaggacacgcttgcacaaactctcggccagacgggaagagcgagtccaaggcttcctgcaggccttggaactcaagcgagctgactggctggcccgtctgggcactgcatcagcctgaatgaggctggccacctgccactttgccctgccctctgcctccagggctccactccccttccttttcttggtgaaaggcacctcctttcctgataatgaatggtgttccctttgcttggctggggagccccccaggccaggtttgctggccatagatacctttgggctgcctgggacaggctcctgaggaggattgagggtgaaagtctcccacgagtacactaaacctaggtctggtcaccaatagggtttggagagcaaagggccacaactcatcagctgcctgtctcttagatgcactttctttttccaccagcacatccttcaacacacagaatttcagggaagagttctccccaaaaccctagctctttacccttccattttagccttccacccagcttccacaaaagatttggctctaccttggatctgctagtaaataactaataggcaggcagttatttgggtaaggaaaaaaggggtgggagagacagaaaatttgcccatctgctgctcctcccccttggctctccacctgggatttgctattgaatctctaccctctcccaccacacagtactgattgctcactgaaagactcagcacccccaatggtgcgcggaagccaggcgggcgattacaatccaattacctattgtcgactcagcccacacaagcttttctcctcctcttgcagggcatggggccaggctccactcccaaatgagactggccccctccatggttcagggtaacagaagggcctgtaggccctggtgaactgaatccagcacaggcctcccctgtaacacaacaggactgagcagaaccaaacacttcttccaactgactctgctccctgccctcaccatctcaaactctgattcccactccactcttcgaggtttctctcagctttttgacctggctccctaagtaggccctagatgatttattcttggcatggcaaagcttgttctaggtcctctgcttgtgagggtcaaagctgtgtcctttcccttacctccctctgccaggacttgctgcagagctgctgagaggattagtgcctttgaagagctgtctgcctgagcaactctatttcaggtgccccacaccggcaagtaccagccagcaacaccaaccaaatgctactctctttaaagtccattttccttcttctttttttttttttttttggagacagcatctcaccctgtcctggctggtctcgaactcctgacctcaggtgatccgccggcctcaccctcccaaagtgctgggattacaggcatgagccaccatgccagacttcccattttactttctgcaagctgtttccctagcagctccctctaggggagaggtgaaatcttgcaagttgtagcaagagcacacaggaaacccctaactttcctataccccacccgcctcttcccctttctgtcccgggatacctggcggcaagagacttcttggctattgtccatgctcccagaatcaagcataaatgccagacacggcgattgagaagccaatcagtgaaccctttggcaaagcccccatccacacctggcactcccctctaccaatccctggcacagggttcctggagagcaggtgctgtacattttacagctttacaatggggctgttgacagccataattagggaggcatgaattatgcggctataatgcagagccctacaattaaggcgggaatgaggggctggaggcagcaaacggaatctgccctatgagcgtggctgttgagtcctgtctcctgggtctgactttccgtaatatgattggggtacagtagaggtgattaatggggctggcatctctctttggcctgaggttctgtattctgggaaaggtacacagggtggagtagggagaagctgccccaggaggcgatgtagtggtggaaagaagaggcagagaggtcgtcgtcgtcgcccagcagcaagggctgcaaaatagtagaactcgtggttgctttggacaggtgtgatttgtgcaagccaggttcaacccttgcctcaagaaatcagatgggaccaatttagtgtccttccacctgtgagccaagcccccatttgaggacatctatcgtattcttgtgtgctgggtctcaaatagaatttttaaagattcttagatgtaaaa

SEQ ID NO: 15547 - DNA, 38940 bp, Homo sapiens
cgcgcccagcggagctaatcaggtgccactgaactgaaggggtgaactagaggagaagagggtgactgggcggggagcagctgcgggagaagcaaagggacgactgagggaataatcaggagaccactgaggcgtgaagtactaggcgtgcgataactgaaggagttagtaactgggagcacagagttggaaacagcttaggggaagatggagaaggaagaaacggggaatgatcaagatgtgggcaccatgatgtggcaggaaaccgacttagatgttcagaagaagtcagtgcagatacggaggaaatgggaatgggaagaagtctgcaaagccaggagaaccgaggaaaggcttttgcctccagaggtcacattgcgttataaaactctgggtggtaaaagattataggcttagaccagtgtctttggattctaatgctggctgctctccatagtccatctgattccccagaagtcagttatagctcttcgcaaaccttggtgacttcttattttctttcttgtttatccaagattacctggctggtgtttgcttgttctggagtgatcttctgactggaaaagaactatgtcatggatcaaggaaggagagctgtcactttgggagcggttctgtgccaacatcataaaggtgagcaatggcccagagcaccggttggccttctggtcagttggataatcttatataaaaacctgttattaaagttgatgatgttaagtgcaattcatgatgttaagtggaatttagcaaggaaaccaaagagtcttagaatggtaacttccaggtctacatttctggtagacttttgtcctaactctgatattttctggaagcccaggcctcttaatgtcactgggcagcctagactgctaagtattctttatagagaactgaaatttgtttccctggaacattgatccattgttccatgtactgtcttcttgatttaaataggttaatctttgatatattctttgatctgtcagtagagctgggcccggtcactcacgcctgtaatcccagcaatttgggaggctgaggtgggcagattgtttgagctcaggagttgagaccagcctgggcaacatggcaaaaccccgattctccaaaaaattaaaaaaatagcagggcttggtggtgtgcacctgtagtcccagctactcggaaggctgaagtgggagaatttcttgagcccaggtcaaagctgcagtgagtcatgattgtgccaccacactccagcctgggtgacagaacgggactgtctcaaaaaaaagagttcagaacaagactctgtctcaaaaaaaaaaaaaaaaaaagagtttgggctctagacgcagacaaacatgggtgaaattcctgttcttttttttattttgagatggagtctcgctctgtcgcccaggctggagtgcaatggcgcaatcttggcttactgcaaccttcatctgccaagttcaagcaattctcttgccttagcctcccaagtagctggggttacaggcatatgctaccacacatggctaatttttatatttttagtagagatgggattctcatattggccaggctggtctcgaactcctgacctcaggtgatccacctatctcagcctcccaaagtgctgggattataggactgagccactgcacctggcctgaaagtccagttctatcatttagtaatcatgtgactttaacaactgtagaattatcatgagaatttatgagacattaatataaagcagttagcataatgtctagcagttcttaattattattaggattgtctttcagacatttgaagactattatctcctatcttccccaaatcttccctcagctttttctctaggaatcacagcaatattatatctgcctaagacaggtttgagattggggccagtcagcttggttttgtttttcaaccacaggctgtcaagcagcaggtagtaatgaatttatgagtcagtaacctttatacaagccccacacatgctcacaaacaaatgccaagtgatctcaagcagtccaggaaatgggaagtatctccttggggaaccactgcagtggtatgtttggaagaacaagctgcataacttgaatggattttgggggctggaaaggctgtatgtgagacagaagtagaaaaaggagaagtgttgatgaggaagcagtcagggaagagccctcccaggtgaggaaaaataggctaaggagtccatttgtgttatgggagacaactcaaagctgctccaagccaaataagggttttgttttttgtggtttcttttttgagatgcagtcttactctgttgcccaggctagagtgcagtggtgcagtcttggcttactgcaacctctgtctcctgggttcaagcgattctcccacctcagcctccccaagtagctgggattataggcaccggccaccatgcctggctaattttttttttttttttttttagtagagttggggtttcaccatgttggccaggctggtctcgaactcctggcctcaagtgatctgcccacctcagcctcctaaagtactgggattacaggcttgagccaccacgtccggccccaagtaagttttgtttggctcaaaaaaagtcttttttgtttgctttgaaaaacaatttttttttttcagacagagtctcactctgtcgcccaggctggagtgcagtggcacaatctcagctcactgtaccctctgcctccccggttcaaacaattctcctgcctcagcctcccgagtagctgggattacaggcgctcgccaccacgcccggctaatttttctttatttttagtagagacagggtttcaccattttggccaggctggtcttaaactcctgacctcgtgatccacccgcctcggcctcccaaagtgctgggattacaggcatgagccactgcgcccggctgaaaagcaaaattttaataaaaatcctgatgtttggttttcttgcaagatcaccagatccagcaatgttgtgccccagttcctgtgtgtcagcagttggctagaggtcaggaattagtgcctttttttttttttttttttttttttgagacagagtcttactctgtcacccaggctggagtgcagtggtgctatctcggctcactgcaacctctgcctcccgggttcaagccattctcctgcttcagcctcctaagtagctgggattacaggctcccaccaccacacctggctaatttttgtttttgtttttttcttttttccgagatggagtcttgctctgtcgcccaggctgcagtgtggtggcgtgatcttggctcactgcaacctctgcctcccgggttcaagcagttctcctgcctcagcctcccaagtagctggtgttacaggcatctgccaccacacctggctaatttttgtatttttagtagagacggggtttcaccatactggccagcctggtcttgaattcctgacctcgtgatctgcccgccttcgcctcccaaagtgctgagattacaggcatgagccactgtgcccagccctaattttcacatttttagtagagatggggtttcaacatgttggccaggctggtcttgaactcctgacctcaagtgatccacccaccttggcctcccaaagtgctgggattacagacgtgagccactgcacctggccctatgagttccttttttctgtggaaggtaccatcttcatttgactatgcccatcaaaatttttcctggccagacacgatggttcaaacctgtaatcccagcactttgggaggccaaatcgagtagatctcttgatcccaggagttcgagagcagcctggccaacatggtgagacccccgtctctacaaaatataaaaaaattagctgggtgtggtggtgtattcctgtagtcccagctacttggggaattgaagtgggaggacctttctcctcccgaaaggtggaggttgcaaatgacctgagataacaccaccacactccatccaccttgggtaatagagtaagactctgttttgtttgtttgtttgtttgtttgtttgtttgtttgttttgagacagagtcccgctctgtcatccaggctggagtgcagtggcgccatctcggcttactgcaagctccgcctcccgggttcatgccattctgctgcctcagcctgccaaatagctgggactacaggcgcccaccaccacgcccggctaactttttgtatttttagtagagacggggtttcaccgtgttagccaggatgggctcgatctcctgacctcgtgatctacccgcctcggcctcccaaagtgctgggattacaggtatgagccactgtgcctggcctgagtaagaccctgtttcaaagaaaaaaaattttttccttttgctttctagttggagaccaactaaaccaagcctgtatttaagagcatatggttgaaagattaactctggaagcagatggacatcagtttgaatccctatttgcctcttcttaaccgcgtgactgggccgggcgtgctggctcacgcctgtaatcccagcactctgggaggctgaggcaggcagatcacaaggtcaggagatcgccaccatcctggctaacacggtgaaaccccgtctctactaaaaatataaaaaattagctgggcatggtggcaggtgcctgtagtcacagctactcgggaggctgaggcaggagaatggcgtgaacccaggaggcagaggttgcaatgagccgagatcgtgccactgcactccagcctgggcgacagagcgagactccttctcaaaaaaaaaacagaacaaaactgtgtggcttatgcaagtcactagaactctctgagcttgtttttccacctgtaaaatgaagataatactatttactttacagacttgtatgataagatgaagtataagaagcccagcatagtatttggcatgtagtacgtgctcagtaaacacgtaaataaaaataagtaggccagctatggtggctcatgccttttttaatcccagcacttcgggaggctgatgaaggaggattgcttgagcccaggagttcgagacctggttaacatagggaaacacaccatctttttttttttttgagacagagtctcgctgtgtcacccaggctggagtgcagtggcacgatctcaactgactgcaacctccacctcctgggttcaagcgattctcctgcctcagcctcccgagtagagtagctgggactacaggcatgtgccatcatacccggctaatttttgtatttttagtagagactgggtttcgccatgttggccaggctggtctcgaatgcctgacctcaagtgatctgcccacctcagcctcccaaagtgctgggattacaggcgtgagccaccatgcccggccgaccccatctcttaaaaaaagaaaaaaaaaaaaagaaaagaaaagaaaaaaggataggtaggtgtggtggcatgtgctggtagccctggctactcagcgggaggcagaggtgggaggatcacttgagcccaggaggccaaggctacagtcagctgtgatcataccattgcattcccacctgggtgactaagtgagatcctgcctcaaaataaagtaagtaactaagtaagtaaactttaatgtctttttactgagttaaaagcacaaagtacccaattcccttcgtcagggttttcatcacatagcccaaacatatcaccttggggtgtagtgtcttcctttatccctgaagaatatgagacctgttcatcatttgtcttcctattccacaggcaggcccaatgccgaaacacattgcattcataatggacgggaaccgtcgctatgccaagaagtgccaggtggagcggcaggaaggccactcacagggcttcaacaagctagctgaggtgggtgtgtatggcagagcccaaagtgaacagtctgtggagaggtagattatagctagaaaaccaggctctgagtttgctgtggttggagagtgttttttgtatctgtctctgtgttttattgtttgcttgctagctatagatctcatcttgacattggccagacgtggttgcttttgcctctaatcccacactttgggaggccaaggcaggaggattgcttgagcccaggggttcaggactagcccgggtaacatagtcagaccctgtctctacaaaaaaatttaaaaattagccagacttgatggtgcacacctgtgcccccagctactcaggaggctgaggtgggaggactatctgagcccaggaagcttgaggctgcagtgaatagagattgtgcccctgtactctagcctgggtgacagagtgacaccatctcaagaaaaaaaaaatgacattaacaaagaagtaatcatccagtgaatgaccataaaatactggaaataagaacaaaattgcctcttcttattttaataaatcaatagtttatattttatgcctcatccaatccttattgtatgctctacgtgacttaacattaataaaattgcatctgtagcttcagtaaccttattttcacttaacattttggttttgtttatttgtttgagacagtctcactctgttgcccaggccagagtacagtgcatgatctctgctcacggcaacctccgcctcccgggttcaagtgattttctgcctcagcctcctgagtagttgagattgaacacccgtcaccatgtccaactaatttttttgtatttttagtagagatggggtttcaccatgttggccaggctggtctcgaactcctgacctcaggtgatccacccccttcagcctcccaaagtgctgggattacaggcatgagccactgcacccggccaacatttggggaggcattttttaaggtgtatatataagctttctatctgtatctttcaatgactgtagaacattttatcaagaggatctgatataatttaactgctccactattacttgacattacaataaacattataaatagtactgtttcagcctgggcaacatggtgagatcctgtctctacaaaacaaaaaaaaaaattagccaagcatgatggtgcatgcctgtggtcccagctacttacgagactgaggtggaaggatgacttgaaccctggaggttgaggctgcagtgagctgtgttcacgtcaccgcaatccaacctggtgacagagcaagaccttgtctaaaaaaaaaaagtactctttttggataaattcttagaagtgacatttctggacgaacattgagtgactactcattctgctttgccaaggctgaggggtttctcaggacacaggtctttcagtgctaaaactggtgaaagtccccggcaaaccaggacatcactctacacagaggtcatgaacattttatggtataatgcatgttataaattggaagacattaagtttaacaaaagaatggaatatgacaatcttggtgaaatttttaagaagaatggagggccgggcgcggtggcttacgcctgtaatcccagcactttgggaggctgaggtgcgcggatcatgaggtcaggagatcaagaccatcgtggctaacacggtgaaaccccatctctattaaaaatacaaaaagttagccgggcgtggtggcgggcacctgtagtcccagctactcgggaggctgaggcaggagaatggcatgaacccaggaggcggagcttacagtgagccaagattgtgccactgcactccgcctgggcaacagagtgagactccgtctcaaaaaaaataaataaataaaagaatggaaatatggtctgtagttcacaggtcccagtgtcctagcacagggacacagtttgatgccagggccgtgatatttttttccttgagtgaatggcagtgaggttctcaccagaaccttgtagaagtctttacgtttgttgactccagcttctcttttgtaactgagaggcagttttgcctaatgcttaggagcttgagctctggagtcactcagaattcattggcacccctgctttgtcactgtctggctttgtgacctgcagcgagttatgtagcttccctttgcctcagtttcttcatctataaaatggggttagcaatctctatctcagtagattatttgaagataaataagatggcacaatgaaaagcatgtagcacaggccctgacctaaaggaagtactcaaaaaattgaaacttgttattagcaactgtattgactgatgtcagtggtgggttccaacccagatgtgccatccacagtggctgccttgcaaggtctttagggcctgaggctattcaagtgtcaggttctcactggcaattttcctaagatgacagtagatttgtttgcttgtatgtttgttaaggggttagagaggcagctcttcagcttgtttcttctgttctgtttgaatgtcttctgttgtctacgtttaacctcccgctctccatctctcaacattgtcctccacctctcaacattgttctccacctttagtggtacaggattagagcagccccaaaggactaagttttcttctttttttttttttttgagacggagtgttgctctgtcacccaggctggggtgcagtggcgcgatctcagttcactgcaacctccgcctcccaggttcaagcgattctcctgcctcagcctcctgagtaactgggattacaggcctgcgccaccacacccggctaatttttgcatttttagtagagacggggtttcaccacgttggtcaggctggtcttgaactcctgacctcgtgatccgcctgccttggcctcccaaagtgctgggattataggtgtgagccaccacgcccggcctgtttttttttgagttgaagtctcactctgtagtctaggctggagtgcagtggtgagatctccactcactggttcaagcgattctcctgcctcagcctcccaagtagctgggaatacaggtgtgcgccaccgcacccagctaagtttctgtatttttagtagaaatggggtttcaccatgttggccaggctgggcttgaactcccaacctcaggtaatctgcccaccttggcctcccaaagtgctagggttataggagagacccaccacacccagccagtttcatttctttttgagttataatttcatatggtgaactgcacagattttaggttttgacaattgcatttatttatctaacccatacccctgtcaagatataggacatttcctgccgggctcagtagctcatgcctgtaatcccagcacttcgggaggccaaggcaggcaatcacctgaggtcaggagttcgagaccagcctggtcagcatggcgaaaccccatctctactaaaaatacaaaaagttagccagatgtggtggcacatgcctgtaggcccagctactcgggaggctgaggcaggagaatcacttgaacgtaggaggtggaggttgtagtgagccaagattgcaccactgcactccagcctgggtgacagagcaagactccagcttaaaaaaaaaaaaaaaaaaagatgtaggacatttccatctctccaaaaaaattccctggtgccccttctcaatcaacttctgttctacctcctccttttcctctctaggcaactaccgttctgatttctgtaactataaatttgtttttcccattctagaactccatataatggaatcagacagttgaggatttttgacatattcttcaactctgagcctgttttatcatttgtaaagtaggcatgaaaacagtagtgtcattttaaagtggttgttcaaagaatcaaatgaaattatgtgaaaaccctttgcaggctattaaatgctacacagctgtccagttgttgctttttttcttttaactcagcctctcaacctaccagaataatgaagttatgctgtgagtaataacaccttgtgtttttatattgttcgttagccaccttgtaagggatggattgtgatcccatattacaggtaaggagacttcaacctagagaaattaaatgatttgattccagtcacataagtgcatgctggagtcagggactagagcctatgtctttacactctcagtgcagagttctttcttgtagtgcacaatgccatcagcattcactaagatcacatttttcagtttcttcaatggtggttttctgcttatttgatgcattaattctgacataaacactgatgttatcctagcttcacccagctttggggaggagaaaagtctgtctcctatctccaactctgagtcaggaccaaaaagtatctcttatttccccttcccactcttccttgtatcctagctccttgccttctcccctctcagactctgcggtggtgtttgaacctgggcatcctagaggtgacagtctacgcattcagcattgagaacttcaaacgctccaagagtgaggtagacgggcttatggatctggcccggcagaagttcagccgcttgatggaagaaaagtaagatgctatcagaggggagagcatgttcttccaccacccccagccttatcctaacccttgaaattctgttatctgaggcttacttaagggacttgcaactctttttaatgttagttagatatcttgggtggcaaatatcagaaatacaagatagtctttcattctttatttctaactttttaataaaaaagggggcatttatttgaggatattgaggggtgtcacatgatttaagaacaagtacagccagcctcaagcaaaactgaaaccaggaattaaacccactaggtagaacctctgtattcatttatttccacctctctctgcagaccagttttctcttgcttcaaaagagcagcctggaatcaataaaatcccttaattgggatccctaaattctatcagatttctaccccagagccaataaactatggccaaggaagtggagttaaagaaaacattgaggaagtcattttctgctgcacagtgaaccctaaaaagttactgtactccccctgcatagtcttttgggagggataggatgatgcataagagacatttatggggaagcatcagtaccattcttagctgtcagtaagtttaggcttaacttagggaataaagccagagaggggcaaagacaaatttcagtggagactgcttgcttcaaagtatggagcccttaccagccagaattgcccgaaagtcttagttacaactgttgtgtgcccagctcctacctgtaccaggaagatgagagaacagtgagcctagaactccagtgaagatgagcctagaacaatgggtggtagggagggtagccaggcttccttctgtctatattaggatggtgagactctgggctacagacattgctccccggtccccagcagagcctgtgtggctcagagtttacacctaaggagccggggatggaggcatggggggcatatcccactaatcttacctttttaaagtgtttactatatgccaggctttgagcctaaaatatattcttactcatcctgtaatcacattataccatgacaaagatattattagccaatttttagagagaaggaaagtagttaaccaaagaagttaaggcatatatcctgggtcacacagctatcagacaggcagagccaaggtgcacacctggatctttttgactccagagctgagctatcatctactacactgtgctctgagagacagaccatattacaattcctgcaagatcaaaacgcatggcagaagagatgctaatgagattgcgctgatcagttagtagtagagaaaatggtcttcgtttatcatgaagtcctggcaaaagcaagaagaaactcagaggtgcttttccattaatgtgccacagaaccccaaggtctgaggaggtgtagaaagaacctagtgggaatggggtagggggtgctgagttgcatttacctattttatgtgttgggcttctgtgtagaatttgatttgaagaaagggttctttggctaaaagaaggtgggaaaaccactggcctgattctgtttcatcagttgggaaactaaaccctagtaaagagaagaggttgagcaaggtggctcatgcctgtaatctcagcactttgggaagccaaggagggtacattgcttgagtccaggaatttgcttgattccagcctaggcaacatggcaaaaccccatctctacaaaaaaatacaaaaaaattaactggggatggtggcacatgcctataatcccagctatgtgggaggctgaagtggggggatcactgtgatgagcctggggagtctgaggctgcaatgagctgtgatcgatccactatgctccatcctgtgcaacagatcgagaccctgtctcagaaaaaataattaaaaataagtaaattaaaattttaaaaaacagaagacaagagcttacacatggtcacacatcaaactagtggcagaactataccacaagctagcaggaggagctgaatcaaggtcttctagtatactgccttcaattaatctcccattttccaaatgtgaagcattcggtttcttcatagcatttccagatgagagaagctggctgaattcattctcactgtatgcagagtttgggagttattgtatggaagcaatataatgtcataattaagaagacaagctctggaggctgactccctacgtgcaaatcctggttctccatcagctgtccaaacaaattacctaacgtccctgtgcctcagtttcctcatctgtaaaaggggaataataagggtatataactcagaggttggtgtaaggatggaatgtgttggtacatgtaaagcacttagaccaatatctggcatttagtaaacatagaatgttagctgtcaccattatcataatatttcactagaacataacaaaagtaccccataatacagctccttcccttgaggagtttactcacttctcaaatgggacaaacttcacagatacataaaatgcaactgcccaaaaaggacacatgaggtcgtgtaatgtatagtaaagagtttgggttcttgctggacatggtggctcacacctgtaatcctagcactttgggaggctcaggcaggaggatcacttgaggccaggagtttgagaccaccttgggcaacatagtgagacctcatctttacaaaaaatacaaaaattagccaggcatggtggtgcatgcctttagtcccagctacttgggaggctgaggcaggaggatcgcttgagcccaggatttggaagttaacactgaaccatgagtataccactgcactccagcctgggtgagagtaagaccctgtctccaaaaaaggggaaaaaaaaatgtagtttggggctgagcgcagtggctcatgcctgtaatctcagcacttgggaggccgagacaggcagatcacttgaggtcaagggttcgagaccagcctggccaacatggtgaaacctcatctctactaaaaatataaaaattagccaggcctggtggtgggcacctgtaatcccagctacttgggaggctgcggtgggaggatcgcttaaacccgggatgcggaggttgcagtgagctgagattgcgccactgcactccagcctgggtgacagagcaagcctccatctcaagaaaaagaatttgggttctcaaatcagacaaactgggtttcaatcctgacaaagcacttgatggctatatgaccctgggcagtccctatctgactgtcctgtctgagccttggcactgaagtaagtttctttcagagttgttgaagggatgcaatgaaataatgcatgtagaacagggtctgacacacaggaaagcactcaaaaaactggtggtcagttattacctgagcaccttgctctctccagctcagcaggggccctatcccaatgctgcctcttttccctgatcagggagaaactgcagaagcatggggtgtgtatccgggtcctgggcgatctgcacttgttgcccttggatctccaggagctgattgcacaagctgtacaggccacgaagaactacaacaagtaagttctcagatttccctatagggagctgtttcaatctttgattccctgctggctttagggagacgtcctgggctttccttggtctggattggtgcaaggggcaatgagagagtaggttgagcagcttagagactttctccgtctgcagggcacaccagacatgattctgcaataacatgttatatgtgtgtatactgacacatacacatagtttctctttcctcctttctctgcccagcccccaccaaataagtgtgtgtgtgtgtgtgtgtgggtgtgtttttacttgacagggaatgggatcggaatacagcagttcttatccctgactttgaagacagatccttcaagaaattcttgttctgttccactcctttaacctatggataggatgaccttgggaggtcatacagatgtacaggggaatagagttcaataatccaaactctgtgatgtgtagctttgaaatataacgtgtattttggcagtggacttgttttacatcaaatctccttcctattttcctttgtttgtgccaatatcacagtagagtcttcctctgaaagccggtgtacagtagaaggggagagggttaggacggcaataggagctatttggtggctgggcacagtggctcacgcctgtcatcctaggcaggtggatcacctgaagtcaggagttcaagactagcctggccaacatggtgaaaccccatctctactaaaaatacaaaaattagccaggtgtggtggtgtgcacctgtaatcccagctactcgggaggctgaggcagaagaatcgcttgaacccaggaggcagaggttgcagtgagtcgagatcacgccattgcacttcagcctgggcgacaagagcaaaactctgtctcaaaaaaaaaaggagccatttagtatttgtcttattataaaactagttacatgtttattccaagaaaacttggaaaccacaaaaaactcataatttcacctttcagaggtatccacaattaacatttgatgtgtatttgtttttctagggaaaggctggaagggcttctctgtaatcagtgacttcaatcatcagtccctgtccccctttggtaaattattctcttcttccctcctcaggtgtttcctgaatgtctgttttgcatacacatcccgtcatgagatcagcaatgctgtgagagagatggcctggggggtggagcaaggcctgttggatcccaggtatcccgagttgttttgcatggtaattgttaaggaaaacaggcctgggccagcatggcagctcacgcctgtaatcctagcacattaggaggccgaggtgggcagtccacttgaggcaggccaggagttcaagaccagcctggccaacatggcaaaactccctcttttcaacaacaacaacaaaaaagcaggcctgtaccaaaccataaagcccctctgtgccatgtacttggccagaggtctaattaggggagcatgtggaaagatttaaggggatctcccaaatttagagattaggattggcttattacaacctgcttcagaactagagttcaccacacaccaagaaaccccagagaaagagcaaagcagatgacaaagccatgttattattcctttacaaattataccctcctggccctttggtagtgtttttccaagaatgacttttcatgaatgcagtttgttggggctagagttctttaggtctctcatgttctagttccacacaagattcaggtgtttttcttttcttttttttttttttttttggtgaggcaaagtctcactctgttgcccaggctggagttgcaacctccacctcccaggttcaagcaattcttccgcctcagcctcccaagcagctgggactacaggtgcatgccaccatgcccagctaatttttgtattttcagtcgagacaggtttcaccatattggccaggctagtctcgaactcctgacgtcgtgatctgcctgcctcagcctcccaaagtgctgggattacaggcgtgagtcaccatgcccagccgattcagggatttttcaaaaagaaaattattaattattgtcaacatagtggaatcctaattattaaaggtggagagacttttgaagccatttaaatatttggtccctctcatgttattatttatgtaacttttaatatatttgtaaactaacagcaatagtaaaataatagtagcaaaaaataacccaggagatgtgttgtgttctgtatttcattaagtcattaaccttatgtgtgagagattcaaggctgttgtccattgtgtagatgagaaaactgagttcagcattgaagtgacttgcccagggtcactctactagtaagtgccagagctgggactcatatctaaagctgtttgattttagggttcttatcctttacctctattatgtgggatcttgggaagcaggaatttttctggttcccttcccgattcgattgacctaggaaactagattaaaaatcaaaaagttacttggtgagaatagaattagataaaaaggagaggagacagtttttgaggctattttatgaatgcctctccttcctaacagctgggtgacatttctctgtcacatagttcattcattcaacaaatattttatttttatttatttatttttattttttattttatttatttttttgagatggagtctcgctctgtctccaggctggagtgcaatggcgagatcttggctcactgcaacctccgcttcccaggttccagcaattcttccacctcagcttcccaagtagctgggattacaggcgcccaccaccgtgcccagctaattttttgtattttttagtagagacggggtttcaccatgttggcgaggctggtcttgaactcccaacctcaagtgatctgtctgcctcagcctcccaaagtgctgagattccaggcatgagccatcactcctggcccatttttatttttattttgagacagggactcactctatcgcccaggctggcgtgcagtggtgtgatctcggcccactgtagtctgtgcctcccgggcccaagcagtcctcccacttcagccttccaagtagctgggactacaggtgtgtgccaccatgctcagctaattctttttttggagacagagtctcactcttgcccaggctggaatgcaatggtacaatctcggctcactgcaacctccgcctcctgggctcaagcgattcttctgcctcagcctcctgagtagctgggattacaggggcatgccaccatgcccagctaatttttgtatttttagtagagacggggtttcactatgttggccaggctggtctcaaactccccacctcaggtaatccgcccacctcggcctcccaaagtgctgggattacaggcgtgagccaccgcgcccggcggttttagacttacgttacagtggatagtggtgcccttcaccatgctaggtaaccctgagagaaaatccagttgaaaagggtcagcagtttggttttggatatcctgtacatgttgaacagagatgtcaggtcaacagttcagcgagggattggtatagtcaggtcaacagtcagacagagatgtcaggtcaacagttcagacagggtttatctctgtcgccagtatggaagccatctgtgtataggttaacttgagcaaagaggggatgagaaagctaaggagagtctgtctgtctatctgtgtatttatctatttagagatggtctcacactgtctcctgggctggagtgcagtggggcaatcaaagctcactgaagcttggaactcctggtctcaaaggagcctctcaagtacccagtactacagacgtgcaccacctacccagctaactttttatatttattttttgtaaaaacagggtctgactttgttgcccaggatggtcttgaactcctggcctcaagtggtcttcttgccctggcctcccaaaatgctgagattacaggtgtgagccactcagccctgcctgttaaggagtgtagagtgagaagaagaaagagcctaagatggcatttttgaggaactctaccctttactggctgggtagaggagaataagctttataagcaaaaacacagaaaagcaggaagaaaaccagggcagccagcattacataagccaagaaaagagggagtttgttggtgcaagttgggaaggggtagggcacccatggaaacaatggtgtcaaatgctgtagagaggtcaattaagatgtagagtgaaaatcagctgttgttaaaacaattaagagactggtggagttagcagaggtagagagcaggcaggaagatgagacagaaaaggggtatagaaatagaagcatgttttcaataaaattcttagtttggaggtactttcgtagttcattatatttttgtgctttataatgaatatgtttcaaatattcttgtatgtatgaaataaatattaaggcacaagggttgacactagaatgaaagaaagccatttgacaagcagatctaatatgcattatgcctaggactctgatcttgactcctagtccagcatgctttaccctcataccacattacagtaaccactaccttatctcctgcttcttgtccagcaagtttttccatatccttctctgtcctgcatggtttagtaacttgcctctgtggggttagttatgcagacagggtgtgggttgggcagtatcaccagggtcaggaggccaatgtctcaacccaccaactcctgaagcttggtgtgctcagactgggctaatcagggcctgaggcgttacactttatattattcgaatttagacaaacctgcatttataacaaagtcagtgcgttaattacaattaggtcctatgcttctaatagctggaattttcctgatttctcactatcaccatccaactcctcatttttctttcttccagggtatgtatgtagatgtgtgtgtgtgtgtgtgtgtgtgtgtgtgtgtgtgtgtgtgtgtgtatttttgtttttttgtttttctgagatggagtcttgctctgttgcccagggtgaagtgcagtggcacgctctcaactcactgcaacctccaccttataggttcaagcagttttcgtgcttcagcctcctgagtagccaggattataggtgcacaccaccacacccggctatttttttttctttttttttttttttgagacagagtctcgctctgtcgcccaggctggagtgcagtggcacaatctcagctcactacaacctctgcctcccgggttcacgccattctcctgcctcagcctcctgagtaactgggactacaggcgcctgccaccccgcctggctaatttttttatatttttagtagagacgggtttcaccatgttagccaggatggtctcgatctcctgacctcgtgatctgcctgcctcggcctcccaaagtgctgggatcacacccggctattttttgtatatttagtagagatgggatttcaccatgttgaccaggctgatctcgaactcctgacctcaagtgatctgcccaccttggcctcccaaagtcctgggattataggtgtgagccatagcacctggcctgtttcgttttgtttttgagacagggtttcactctgttgctgaggctgaagtgcagtggtatgaacatggctcactgcagcctagacctcctgggctcaagagatccttccacctcagcttcctgagtatctgggaccacagatactgctaccacatctggctaattttttgactttgtagagacagggtcttgccatgttgtccaggctggtctcaaactcctgggctcaagtgatcctcctgccttggcctcccaaagtgctgggattacaggtttgaaccacggcacctgaccgaggtatatatgtatttttttagcagttaaattaatagattgttttgtgagtctggaaattatagaagaaggaagtagattgagaccaaaggatagttaataaattctattccaccgtgttaccttgaacgggctacttgattccctgtaggcctctgtctttcttataaaacaatagtgttaatagtaattgctaacacttactgagcatttactctgttccaagcattaagtattccacatacatttatccttagaccctataaggtagatactgtttttatgcccattttaaagatgagaatactgagacatggagaggaaaagtaacttgtgcaagttcacatagttggcaaacctgggggccaagatttcaacctggcttcagagcctgtgttctcattcactgtggcatattgacttcctcatagcaaagctgaaatgaacaataaggcagtaaaaaagaaaaaaattagatggacatggtgacttatgcctgtaatcccaggactttgggaggctgaggcaggaaaatcgcttgagccctggagtttgagaccagccctggcaacacggcaagaccctgtctctacaaaaataaaacagttagctgggtgtgctggcacacacctgtagctacttgggaggctgagtgaggaggattacttgagcctagcaggtcgaggctgcaatgagctatggttgcgccattgctctctagcctgaacaacagagtgaaaccctgtctgaaacacacacacacacacacacacacacacactcacttttgacataaatatttataacacatgaaatcacataatgaatagtttacactctgaatcatgcttttatcattcaatgttacgagtacttttcatgacccgtgtttttaataattcttcatatcattatttataatggctgtaaaatatatcttgtgttaatttctttaaccagtcttctatttgttgggtatataggcagtttaatatttcattattacaaataatgccacaattaaatctttgactgaacttgcctgcattttttattgtttcctcaggatctgagtttgaaagtgctcatttcaccttattcttgccaagattttttaaatgtaaactgttctgaccaggtgcagtggctcatacctgtaatccagcactttaggtggctgaggcaggttggatcgcttgagctcataagttcgagaccagcctgggcaaaatggtaaaatctcgtctctaaaagtacaaaaattacctgagtgtggtggcatgcacctatagtcacagctacttgggaggctgaggtggaaggatggcttgagcccaggaggctgaggctgcagtgagccaagatcacatcactgcactccagtctgggtaacagccagatcctgtctcaaaaaataaaacaaaaaaataaacctattctcataggtaaaaactgatattttaccgttatttaatgtaaatcatttccgaaaagtcttcacgtagacagctttaactcaccattccatttagtgatggatttttgttggccaaagtctacagatgttccattttgattttgtcagtttcatctttccaccctagagttaacccctttttttttgtttttgagatggagtcttgctctgtcacccaggctggagtgcagtggtgcaatctcggctcactacaagctccgcctcccgggttcacgccattctcctgcctcagcctcccgagtagctgggactacaggcgcccaccaccacgcccggctaattttttgtatttttagtagagacagggtttcatcgtgttagccaggatggtctcgacctcctgacctcatgatctgcccgcctcggcctcccaaagtgctgggattacaggcgtgagccaccgcgcctggccaacccctttgtttttttgagacacagtctgctgtatcactcaggctggaatgcactggcacaatatcagctttttccattaagaattctgcccactgcagaattcttactgcatacctactgcctaaagtaggtagaagaaactctttgcagataaattgtaaactcagagagactgagtctctgaagtcacactgcaagttggtgggactgaaaataattttttattattattctttatatagcactttatagttcccaaagtgcactcaaatctattatttcatttgatttgaccctcatgataacctataaggtggataggacaaatgggccctgtttttttttttcccttttaattacatttattttaatgctgaatttactcctgtgccataagtttttgtttcttcagtttctttgggatatcattttcttctgggcaacctcctcttctggtttaggaacaatctgttccttttcagtaaggatcatctcaatgtggcagggagagctcatggatgggttaatccaaccatgagctctgtaggtccagcggcacatcttaggtgctttgttcacttggatatgctcaatgaccagagaatctacatttaaacccttaagttcagcattactctctgcatttttaagcatgtgcagcaaaaattcagcactctttttgggccactgaccttgtgtccagccccactgcttggcctgggcacacctgccagctccaccattgtaacgtcggaatggtacgcactgtttctgtaaagtgacatctttcaggtacttcatggcttttcgtatatgcatacccttgatggcctgggcagtttcacgaatattcttaaagtaaacacgaagattggaacctcttgatttgcatgatatcatgaggttctccgggttaagtgaatagtgaaccattttcacagattacctcaggccgcttagggaaagagcaaatgggcccattttaaagataagagaatgagaaattatatggattgtacagagtctcacataacttggagaattaagaccatgctgccaagacaagattgtcagattaccagagaaatctgaaccagagcccttcttattgctcaattataagtgaatactgtttcctctgtgatgatgatacggaaaagaaagctctctctgtggtttgccttaaaggactgagagagatgagcaacttggctgggtgcagtggctcacacctgtaatcccagcactttgggaggccgaggcaggcagatcacttgagctcaggaattcaagaccagcctggccaacatggtaaaaccccgtctttactcaaagtacaaaaattagccgggtgtggtggtggctgcctgtagtcccagctacttgggaggctgaggcaagagaatcacttgaacccgagaggtggaggttgcgggagccaagattgcgccactgcactccagcctgggtgacagcgcaagactccatctccaaaaaaaagatgaataacttgcctaaagacacacaactagtaagtgtagagtctggttttgaacactcagcccagatctttctgctttcctgaccatgcgtccagaaacatgttcccaccaagaaatttttgtcttctggaccctttccaagatgtaactctaactacctggacattctgaattctgcttctgggtagttggtaggacaggtaaacagcattcttggagccaacagacaccagccatgcaaataccctctttctgtggacaggatagttttacttaagataaatgcttccactcaccagttttcttcaattctatctcctttctgaccatctctgtgcttgggaaagtagctcttatcaaacacaggagaactgatcatattgctgtttatttaaaatccggtgtaatgtggaatttttgcaatgtttcaggatccatatgacttaaataagattttaaaaataaattagctgagcatggtgttgcacacctgtggtcctagctacttgggaagctgaggtaggaggattgcttgagcatggaaggtggaggttgcagtgagctgagatcacaccactgcactccagtctgggcaacagagggagaccctgtctggaaaaaaaataaaatatgttttctgtttttttttgttttgagacagagcctcgctctgtcactcaggctggagttcagtggcataatctgggcttactgtaacctccacctcctgggttcaagcgattctcctgcttcagcctcccaagtagctgggactacaggcatgcggcaccacacccagctaatttttgtacttttggtagagatggggtttcaccttgttggccaggctggtctcaaactcctgatcgcaggtgatctgcctgcctcagcctcccaaagtactgggattacaggcatgagtcaccacgcctggccaaaaaaagttatttacataaattcaaacaataacagaagtacataaagtaaaaagaaatagtcttttcttccttacttcttatccaatccactgttaatagtatgatgtatctttttagactttgttctttatgtatacttatatgcacgtgtgaatgtttgaatgtgtgtgtatgttttatactatatattctctgaaacttgccttttacatttaacattagattttggacatctttccaaatcagtgcatttagatttatctttatttttagaatgcagttgcatagtatttcatcaaatactgggccataggatgtatgtatgtattttaaaaaacaagatgtttttagcaaaagacaacagatatttttgtgggtgcatctggttttaggcctgaggctaaatgactttcagcaaattattcatctttgagcctcagtttccttatctataaaatgaggatagaaataccttatgtatctgctgagcatggtggctcatgcctgtaatcccagcactttcagaggccgaggggggggcggatcacgaggtcaggagatcgagtccatcctggctaacatggtgaaaccctgtctctactaaaaatacaaaaaaaaaaaaaaacaaattagcagggtgtggtggcgggcacctgtagtcccagctactcgggaggctgaggcagaatggcatgaacctgggaggcagagtttgcagtgagccgagatcgtgccactgcactccagcctggggaacagtgtgagactctatctcaaataaataaataaataaataaataccttatgtatcagaacatgtcaaaaaaggcaaaaaataaaaaagagaaaagaattttacattgtattctctaaaaaaaaaaaaaaaaaagaaataccttatgtagttgtgaagatttaaattcattcattaatttagcaaacattttttgagggccttctgtgtagtattggctagtgtatttgatggtattgtataaactgagaagcctatatatggaagttcaccatgagaacactacagaaagagaatactacaggatgtgtgcctctctttgtctcttcttgctcatcttagtgatatctctgagtctctgcttgataagtgcctctataccaaccgctctcctcatcctgacatcttgatacggacttctggagaagtgcggctgagtgacttcttgctatggcaggtaggtcatttccaagtactattatgtttgtgtcatggggaaaccaactgtatccacagaatggatcagagtggtccatccccactcccaaacaggctggggccagagtacttctggggaaagctaaaatctggagaagcatctctaggctgtgtctcataatatttgatgtccattcctcatctgtcgctggctttgcgaatccaactatagtgaaaacttcattgtgccgcttttcaaggaatgggacttctgtcttgcatccctgagcgtaagctcttgccttggtaacctgccagggaccctagcccctctgggttggaagcttgccttgcagttactagtccctccccttcaggataaagggccatacctatgcaagcatggtaaacaatatgcaaacactcaagtctctatcccctgttaacttggtccctggagagcacataactaggggaagtccttgttctgggagagactccatttggaagcagctcacatgataaagctccagaaattttaatggaccacaatcttaaaagtgagctaacgcagggcgtggtggctcacgcctgtaatcctagcactttgggaggctgaggcaggcagatcacttgaggtcaggagtttgagaccagtccagccaacatggtgaacccctgtctctactaaaaatacagaaattagcctggcatggtggcaggtgcctgtagtcccagctacttaggtgaatgaggtgggagaatcacttgaacctaggaggcagaggttgcagtgaggcgagatcgtgccactgcactccagcctgggcaacagagtgagactctgtcgcaaaaaaaaaaaaaaaaaaagaaaagaaataagtacaatgtgcacctattggttctgtggcccactgtgctgctcagatcacgtttgggaagtttactgatgggctgaattttaagagactacagagtcagttactcagtgtacagaattagttacattgacaaacttgaggacttactggaagaggccaaactggaaagcaaggaatctcatgtcttacaaaaaatgaggaaaggatagtggtctgcaaaagggaaataagtgacaatgtattcccttggaaaaaagtgttgagttccttctttatgctggaaatatggcagtgagtgagtcagaaatgatccctactgtcttgaaacttatagtttgctagcaaagacaaactctgaacaagtcattacaactttgggaactgataacaggcagctctaatctagccttgaaatacttgaaagaatgtcactttgaagaagaaacaaacttgttccagaaaaaatacctgggaccttagtagaagttgtagggaaggtgacattggtttagcataaaaagccaaacaggctatcggacaactagttatcccccatgaggtactgaattcctcaccactagagatatcaggcagtggctgtcaagagtgttccaaaggggattcttcatcagtgattattattaaagtacacctggctctttgctatgcatatgttatctcatttaatctaaacagtaccctgaaaattaggtattcctattatccagttttacatttgaggaatctcaggccaggtgaaattacccctgctcaaataaatggtaaatggttggagccaaaattcaaagccaggcagtctggctccagagctcatgctctcaaccactgtgccctgctgctggtacttaaaaataacaatggcagctaccatttgttcattggtgacctttatcagacagtatgtcttccagatgccctctaagggccaagagccaataacataatccagatgttatttcatagtcctaaaattggctcttagaaaaatcctggtggaaatgttgatctagtctcgttttagttctgctttaccacaggcaggtgatctggctgcctcaagtgacgcctccccctactagtgaatgaatcagggccagcagcagctgcagctacagctcaggatgcctgtaacattgtcatctctgggcttctgggtcctgcttagcctgctttttccctggaggactgaccagggatgcggcccagcaacatgttactaaatcatactctcctccctacctttcccagacctctcactcctgcctggtgttccaacccgttctgtggccagagtatacattttggaacctcttcgaggccatcctgcagttccagatgaaccatagcgtgcttcaggtaagaaagagttcagggctggccagatgggatgggatggaagaaaagattagcattgattgacaaccaccttactatataccaggcacttcctaataagatgatgataatgatgatagtagctaccacctactgagtatctactacttgtcaggcactgcgaacattttacatgctgcaactcatttaatgttcccaagaacccaatgagggaagtcttattagcccctcccttatgtaagtaagcaaacagaaatgatttagttaaggacacataatcagtaagaggtaggaataggatttgagctacaggtcttttatcttttaaagactcaggaggaaaaggcttctcagagaaactggccattattcctttaaagtattaccctaataaaagatcgtagcagtagggattaagaactaaatagcattgtctttccattgtgtaaacctatgttgtgtcaagacttgaagtttgactttcagttttcatcaccaaatcttgaaacaggttttattagcagtcacctgtatatgattaggtctctttataataatggtagtggtagctaacatatgaggatctacgagggcacttaggtgatttcatgtaagttttcttatttaacctaacaacccagcagttttggtgtcctcatttttcatatatggaaccagaggggcagagagacttaagtaactgtcccaaggaacctgaattttatctttatttatttatttattttgagatggggttttgctcttgttgcccaggccggagtgcagtggtgcgatctgggctcactgcaacctccccctcctgggtttgaacgattctcctgtctcagcctcccaactagctgggattacaggcacacgccaccatgcctggctaatttttgtattttcagtagagacagtgtttcaccatgttggccaggctggtcttgaactcctgacctcaggtgatccgcccaccttggcctcccaaagtgctgggattacaggcgtgaagagcctgaattttaaaatcaaagctggtgctgcttcttcagtctggagagataatgccaggaggaaataatgatgtgagtcagggattcttaatctccttggtattggggtccctttgaataatctaatgaaagccacagaccatctccctagaaaaatcgcagatcactcaaatgtggaattttgcatagaattgtaaacttatcatggaaacacatagaatactttttttttttttttttttgagacggagtttcgctcttgcggcccaggctggagtgcaatggcgcaatctcggctcaccgaaacctccgcctcccgggttcaagtgattctcctgcctcaccctcccgagtagctgggattacaggcatgcgccaccaatcccaactaattttgtatttttaatagagatggggtttctccatgttggtcaggctggtcttgaactctttacctcaggtgatccgcccgccttggcttcccaaagtgatgggattacaggcatgagccaccaagcccggccacacatagaatactttaagggggttcacataactgctgaaatctgcccctgaatcccaagtccataactcctgctataagtaaatcaaatcacaaagacttgatcatgtatttaattacttagtctcagaatatgaggaaattaaaagaagtttagaattagtgaaaagaaaaacagcaaaggcacaattatccactgtcagtggggaatgaatatcagatttttccatatgaccaaagctccctctaaaaactaaaactttacccttttttgatggaaaaatttctaaaatgtatcttgtacataattcattgaaatctatataccaggcacttgctaataatgatgatgattaggataatcacgtgctattttttgtttttttttttttttagcagggtctcactctgttgcccaggctggagtgcagttgtgcaactttggcttacttcagcctcccaagtagctaggactatgggcacacaccaccatgcctggctgatttttgttattttttgtagagataagtcctcactatgttgcccaggctggtcttgaactcttaagctcaagtgatcctcctgcttcggcctccccaggtgctaggattatagacatgagccaccatgcctggccgtcatattctaatgattatgataatagtaattatcatctttaaacacttcattgtacaacaatatccttgaggggtagggctgtttgctctaagttagatggtcccagaatacctgggtttgaggtttcatgtatatttttctgtgtcctccctctttcatttcctactgctgtcaacagttaattttgacagtatctctcctcttccatagtatttactgttttaaatcagctatagacaaggaaaccagatagtcaagcttgttggaattatgtatataaaatgagagtgaactggctctgcatgaagcccaaaggagcttggtgcatgagtttttgtgtttttacctctaattgggctgctcagaagtcttttatagtaatttcacgtttctcagatactttgcatatggttgtcagaggagttaactcaagtttcattcattccataagtatttattgagtagtatgaatcaggcactgtattaggcacaggagagtcaacaggtagccagagggacaagatctctacctttgtggaacttgtattcttgaggagacagaaataaacaagtaaacaaatatataagttccgattgtaataaggcagtgaagaatacagagtgatgtgctagaaagtaatgaagagaatgcaaagagactgaggttaaagtttgggtcttggaagaacaaaaaagaggtcaatgtgccaagggagaagggcaggaaatgaggctagagtcagaccttggctcatatagagccttgtaggtcatggtaacaaagctgaaggactttaatcaggggatgacgggatctgagttgcattttgtaaaaatcattcagaattttcaacgggctggagttaaagccaagagacagaactcctgcagtagtccaggtgagagaggatgcgcctcgaggtagggtggtggcagtagggaaggggaggagtgaagacgggataaaaacaaatgttgaaatagaaacaagtgaaactagctatatcaaggtgataatataactccccagagaaaggaattaattcagcttacctgaacacagttctctgctattcatctttagtggaatttcttttcaggataatacaaactgcaacacaaaattaaacattacttaagaggtttattgttagtggcaatgttggtaatgtaattatgaaactcttgtttctttttttttgaaatggagtttcgctcttgttgcccaggctggagtgcaatggcgtgatctcggctcactgcaacctccgcctcccaggttcaagcgattctcctgcctcagcctcccaagtggctgggattacaggcatgtgccaccacatctggctaattttatatttttagtagagatggggtttctccatgttggtcaggctggtctcaaacccccgacctcaggtgatctgcccgcctcggcctcccaaagtgctgggattacaggcgtgaaccaccgcgaccggcctgaaactcttgtttcttgtaggctaaaacaaataagtacaaataataatgttattaggaaccaagacacttaggttgtggccatagcaattggttgtatagttctgctgtttcctgggatggggtggaaggtgtttgaggtcaactattaagtgttccatttttacctatggatcatatttgcaaacttttttttttttttttttttttttgagacggaatctcactctgtcgctggagaacagtggcatgatctcggctcactgcaacctctgcctcccggattcaagcaattctcctgcctcagcctcccatgtagctgggactacaggcacgtgccaccacgcacaactaatttttgtatttttagtagagacagggtttcaccatgttggccaggctggtctcaaaatcctgacctcaggtgatccacccaccttggcctccgaaagtgctaggattacaggcatgagccgctgcgcccggcctatatttgcaaacttttattgagttcttaccacatgtcaggcatccttccagtattgagttcttaccacatgtcaggcatcctttcagtaaattctgtgaactgctttaaggcagatactattattattgcctctgtttttagagcaaggaatccaaagttataatagagatactgattatcttgaagccttctccagcaggagcccttggaggtcctggccaggctttctctaccccagaagcttcaaagctctgtttctagaaatcatatcaccttggcagatgcactaaggggagaatccagactaacagcatcctcaccagtttgttctcagaccagagaggtctttccaggcttttctcatgtctcccttttacagaccctgtatcatggccaaactggactcttcccagttacctgttccatgccctccagtttcctacctgtatgtctgtgctcttgccccatcacccaaattcccattttaaaatctgagctgctctgtctctaggccctgcccaatgtgtccctattctctgcaggaagccagggcaaggggctaggctctggacctagagtagcttactgagaggaaggcagcgggtggatcgtaagggaagcagggacttggctacaagttgtggggagccagaccttggtatctgaatggaccatgacagtctccaggtggtcacctagccagtcttaaaggctggcaaagggagatcttgactatgatgcagtaggacttgtcagcaaagaggcagggacaaatagagaatcaggccagggagggggtgtgcggcagtgcagagcagctgatcctcaatcacaagttgcatggatggtaggtccttgagaggtcactgatggagatgagtaaaaagtgttcacctcatctccaaggatgatattagagagggaaaagacacatgttcccacgaagcttcctgtagtacatttgtcacaatttaaacgggctggattgaacattatatttcttctgctcttcaggttgtcactatcttctcctcaggataaaagcttgagttatgtatgtatgcatatatgtatgcatgtggaaatggggtctcgccatgttgcccaggctggtcttgagcagctgggctcaagcgagcctcccaccttagcctaaaagcttgagttaatgtctcagacattcatgactttgaatattggcactgcctacatagctatatgactgtacagttacttaacccctcagagtatcattttcctcacctgtaaaatgagagaagtagcgtttacagtaatacctaccttgcaggtttgtgatagggattcagtaagctaacacatgtcaagtgctgagtgcagtggctggaacagagttcattttccaagaatggtggccaatattgttccccacatgtgtgtctcttggcctctcctcagactcctctctggaaaagcaccctgcacatcctgtccccagtacaactccccaggcaaggagactctgagggtgcttcagaacatcatgtttctggtaggaggtgcccttctctgcctgagagcagccctcagaaatgcattcctcatgctgctgacctgggctggctggttgcagcttggggaaggacttttcattggctaatgttttgaagccaaggacctgcagcctctctccaggtgccaacagagtggtagaggacttttagatttaagtactggagggactattacatcttgttctctgattctaccaaggagagaataagagcagagagggataatgcccaggaggaatttagattcataggttagaaccacatttctcaaagtgagcttcttggagcccttgcaccaagattggataaggtctgtacaaaaagtctctaaggaaagaattaacgccctcacttaccctgattggtcattatacaaggatagtagacaaatggtcagggagagaaaagttgacctctaggacttctgttagcttggatttcccaagggtaagtacttgagaagaactggaaacacctctgagattgaaagggtagattcagaccatgtggaagctggatagacaggtatccagatacaggccaccagcttttccacccctagaaagtagagcttatacacaggcacgagatacacttcacattgtcctctcaagaagttatcttagtggagaagccaagggaacttcagccatctcagcctcgctgtcattttctgtaaaatgacgagcagacaccctcccaactctgctatctgaacaatgaactgctaattcctggcagacaggggccaggctctgcctgggctacagcccccattgctggcatgcactctgatgccatctggaagaagcttgcgcctcatgaagtggctttagctagctccatatttcctccctctgttgctgagcgtcccccatcctttctgttctgccagaaacttagactacttagcccagtccacaagtggcggtgatagaacagctaacagttaatagccaagcagtaggctgaaaattcattatctcatttttcctcaaacaacccagtgaggtgggtactcttatcccggttttgcagagtaagagagagccttagagaggtgagggaggccttaggaacttctcaaaccccagtgctccaggtggacttactctggccttaacaggctcttcggttccatgcatctttgctcattactcccactgccagaatattctccctgccccccacacacctcacctctgtttgaatcctcctcattggttaaagggccagctcaaattctgtctgtccatgaaggtcactgctccgtgatgttcatcagccacacttgctttctcctctgaactgcatgacccttaccacatcctattttgcatcgtggcactctgtgtgcatggctgtacaatcagcctgtaagcacctggattgctgggatcgtgtcctgcgcatctccatatcctcaaaaaaaatcctgtatgtagcacccagggagcctcctgaccaaggcctggaagaagcccttccagcaagacggagagctctacggcaactgttcaagcccgaagtcctcatagctccacatgtaattcattgtaatagcagaagagaagtattcttgaatgcctgggattattcaggagccgggggggacagtccagaattctcatttgtcatccttattcatgcagtaaacctttattgctgagagacagcaaatcagttccctgctccatgtctgtctccagcagaaagtacctccctcacagctccattgtgagggtcaagtgaggcaacagatgaagtggttgtgcacatgtaagatattctttaaaccatgaagacagagcagtcaaggtgcttacaggctgattaggacaaaaacatgtatacaagtttatcgtaatacaaggtagaatgtgggaagggtcatcagggtataggataccataggaaaatagagtttctcacacatggaataggtttggcaggaggagctctagtgcaaaggctttgcaggtcagttagactggcaggaacagagaggatcagtgaggcacaggaaagccttggttctgctccaaagggattttccgctcttctgtatcaggagcatcctcactgctctcctgggatcacgtggtcagtcagttgagtgtttcacatgtacagggcaccccaagtgctggagaggaagaagcccagtctctgccctctagtacttgggatgataactgctgccagggagtatgatcaccacctggtgtcagagctggttgcaagaggcttgaaggctctcaaacttccaagggcttattttctaacagaaagagtggattgtgaacactaacacttattctactatgcagaatgcaataagtggcttaagagagttgaacctgcttctcagaatgttcataggggggtcatttgctggaaggatcaggctggtcttcatacaggaggcaagtctggagctctgaaaaatagcctagggagtggggaggatggtaccctcagaggaaaacctggggagatcaaaggaagtgacccaagggacatgtccccgacaagaataggacctttcttgcagcggagaatagacaataacaacttgtaaaattgctgtttctgtctaagagcctgctaatatcctagagaggattttgcatatgttatctctaatccttaaaaccactcttcaaggtaggcacaacccccactttacagatgaagaaatgaggttaggacaggatttgcccaaagacacaaagccagttgatgggggaatcagaagtcagacccacatttgtttggttccaagagcatgagaaaaactttaagaagtacagacgcttccacacaaaacaaaccaagatggacccagaattgccactgccctgcctgtacaacatgagcaccacccactgcatacctactcccaagccttttcaaatctggtacctactttccactgttccacttcacttggcccaccctgtgccccaccccctacctcctccatcccagtttcacccactcctaaaaatgatctccccaccccaatccccacttttctctagcagaaggcccgagacatgtatgcagaggagcggaagaggcagcagctggagagggaccaggctacagtgacagagcagctgctgcgagaggggctccaagccagtggggacgcccagctccgaaggacacgcttgcacaaactctcggccagacgggaagagcgagtccaaggcttcctgcaggccttggaactcaagcgagctgactggctggcccgtctgggcactgcatcagcctgaatgaggctggccacctgccactttgccctgccctctgcctccagggctccactccccttccttttcttggtgaaaggcacctcctttcctgataatgaatggtgttccctttgcttggctggggagccccccaggccaggtttgctggccatagatacctttgggctgcctgggacaggctcctgaggaggattgagggtgaaagtctcccacgagtacactaaacctaggtctggtcaccaatagggtttggagagcaaagggccacaactcatcagctgcctgtctcttagatgcactttctttttccaccagcacatccttcaacacacagaatttcagggaagagttctccccaaaaccctagctctttacccttccattttagccttccacccagcttccacaaaagatttggctctaccttggatctgctagtaaataactaataggcaggcagttatttgggtaaggaaaaaaggggtgggagagacagaaaatttgcccatctgctgctcctcccccttggctctccacctgggatttgctattgaatctctaccctctcccaccacacagtactgattgctcactgaaagactcagcacccccaatggtgcgcggaagccaggcgggcgattacaatccaattacctattgtcgactcagcccacacaagcttttctcctcctcttgcagggcatggggccaggctccactcccaaatgagactggccccctccatggttcagggtaacagaagggcctgtaggccctggtgaactgaatccagcacaggcctcccctgtaacacaacaggactgagcagaaccaaacacttcttccaactgactctgctccctgccctcaccatctcaaactctgattcccactccactcttcgaggtttctctcagctttttgacctggctccctaagtaggccctagatgatttattcttggcatggcaaagcttgttctaggtcctctgcttgtgagggtcaaagctgtgtcctttcccttacctccctctgccaggacttgctgcagagctgctgagaggattagtgcctttgaagagctgtctgcctgagcaactctatttcaggtgccccacaccggcaagtaccagccagcaacaccaaccaaatgctactctctttaaagtccattttccttcttctttttttttttttttttggagacagcatctcaccctgtcctggctggtctcgaactcctgacctcaggtgatccgccggcctcaccctcccaaagtgctgggattacaggcatgagccaccatgccagacttcccattttactttctgcaagctgtttccctagcagctccctctaggggagaggtgaaatcttgcaagttgtagcaagagcacacaggaaacccctaactttcctataccccacccgcctcttcccctttctgtcccgggatacctggcggcaagagacttcttggctattgtccatgctcccagaatcaagcataaatgccagacacggcgattgagaagccaatcagtgaaccctttggcaaagcccccatccacacctggcactcccctctaccaatccctggcacagggttcctggagagcaggtgctgtacattttacagctttacaatggggctgttgacagccataattagggaggcatgaattatgcggctataatgcagagccctacaattaaggcgggaatgaggggctggaggcagcaaacggaatctgccctatgagcgtggctgttgagtcctgtctcctgggtctgactttccgtaatatgattggggtacagtagaggtgattaatggggctggcatctctctttggcctgaggttctgtattctgggaaaggtacacagggtggagtagggagaagctgccccaggaggcgatgtagtggtggaaagaagaggcagagaggtcgtcgtcgtcgcccagcagcaagggctgcaaaatagtagaactcgtggttgctttggacaggtgtgatttgtgcaagccaggttcaacccttgcctcaagaaatcagatgggaccaatttagtgtccttccacctgtgagccaagcccccatttgaggacatctatcgtattcttgtgtgctgggtctcaaatagaatttttaaagattc

SEQ ID NO: 15548 - DNA, 39013 bp, Homo sapiens
gcagcgcccaaagatgacgtgttctgccagcgccacgtcatgaggaagtgccggcccactgaagccgtggggacgcgcccagcggagctaatcaggtgccactgaactgaaggggtgaactagaggagaagagggtgactgggcggggagcagctgcgggagaagcaaagggacgactgagggaataatcaggagaccactgaggcgtgaagtactaggcgtgcgataactgaaggagttagtaactgggagcacagagttggaaacagcttaggggaagatggagaaggaagaaacggggaatgatcaagatgtgggcaccatgatgtggcaggaaaccgacttagatgttcagaagaagtcagtgcagatacggaggaaatgggaatgggaagaagtctgcaaagccaggagaaccgaggaaaggcttttgcctccagaggtcacattgcgttataaaactctgggtggtaaaagattataggcttagaccagtgtctttggattctaatgctggctgctctccatagtccatctgattccccagaagtcagttatagctcttcgcaaaccttggtgacttcttattttctttcttgtttatccaagattacctggctggtgtttgcttgttctggagtgatcttctgactggaaaagaactatgtcatggatcaaggaaggagagctgtcactttgggagcggttctgtgccaacatcataaaggtgagcaatggcccagagcaccggttggccttctggtcagttggataatcttatataaaaacctgttattaaagttgatgatgttaagtgcaattcatgatgttaagtggaatttagcaaggaaaccaaagagtcttagaatggtaacttccaggtctacatttctggtagacttttgtcctaactctgatattttctggaagcccaggcctcttaatgtcactgggcagcctagactgctaagtattctttatagagaactgaaatttgtttccctggaacattgatccattgttccatgtactgtcttcttgatttaaataggttaatctttgatatattctttgatctgtcagtagagctgggcccggtcactcacgcctgtaatcccagcaatttgggaggctgaggtgggcagattgtttgagctcaggagttgagaccagcctgggcaacatggcaaaaccccgattctccaaaaaattaaaaaaatagcagggcttggtggtgtgcacctgtagtcccagctactcggaaggctgaagtgggagaatttcttgagcccaggtcaaagctgcagtgagtcatgattgtgccaccacactccagcctgggtgacagaacgggactgtctcaaaaaaaagagttcagaacaagactctgtctcaaaaaaaaaaaaaaaaaaagagtttgggctctagacgcagacaaacatgggtgaaattcctgttcttttttttattttgagatggagtctcgctctgtcgcccaggctggagtgcaatggcgcaatcttggcttactgcaaccttcatctgccaagttcaagcaattctcttgccttagcctcccaagtagctggggttacaggcatatgctaccacacatggctaatttttatatttttagtagagatgggattctcatattggccaggctggtctcgaactcctgacctcaggtgatccacctatctcagcctcccaaagtgctgggattataggactgagccactgcacctggcctgaaagtccagttctatcatttagtaatcatgtgactttaacaactgtagaattatcatgagaatttatgagacattaatataaagcagttagcataatgtctagcagttcttaattattattaggattgtctttcagacatttgaagactattatctcctatcttccccaaatcttccctcagctttttctctaggaatcacagcaatattatatctgcctaagacaggtttgagattggggccagtcagcttggttttgtttttcaaccacaggctgtcaagcagcaggtagtaatgaatttatgagtcagtaacctttatacaagccccacacatgctcacaaacaaatgccaagtgatctcaagcagtccaggaaatgggaagtatctccttggggaaccactgcagtggtatgtttggaagaacaagctgcataacttgaatggattttgggggctggaaaggctgtatgtgagacagaagtagaaaaaggagaagtgttgatgaggaagcagtcagggaagagccctcccaggtgaggaaaaataggctaaggagtccatttgtgttatgggagacaactcaaagctgctccaagccaaataagggttttgttttttgtggtttcttttttgagatgcagtcttactctgttgcccaggctagagtgcagtggtgcagtcttggcttactgcaacctctgtctcctgggttcaagcgattctcccacctcagcctccccaagtagctgggattataggcaccggccaccatgcctggctaattttttttttttttttttttagtagagttggggtttcaccatgttggccaggctggtctcgaactcctggcctcaagtgatctgcccacctcagcctcctaaagtactgggattacaggcttgagccaccacgtccggccccaagtaagttttgtttggctcaaaaaaagtcttttttgtttgctttgaaaaacaatttttttttttcagacagagtctcactctgtcgcccaggctggagtgcagtggcacaatctcagctcactgtaccctctgcctccccggttcaaacaattctcctgcctcagcctcccgagtagctgggattacaggcgctcgccaccacgcccggctaatttttctttatttttagtagagacagggtttcaccattttggccaggctggtcttaaactcctgacctcgtgatccacccgcctcggcctcccaaagtgctgggattacaggcatgagccactgcgcccggctgaaaagcaaaattttaataaaaatcctgatgtttggttttcttgcaagatcaccagatccagcaatgttgtgccccagttcctgtgtgtcagcagttggctagaggtcaggaattagtgcctttttttttttttttttttttttttgagacagagtcttactctgtcacccaggctggagtgcagtggtgctatctcggctcactgcaacctctgcctcccgggttcaagccattctcctgcttcagcctcctaagtagctgggattacaggctcccaccaccacacctggctaatttttgtttttgtttttttcttttttccgagatggagtcttgctctgtcgcccaggctgcagtgtggtggcgtgatcttggctcactgcaacctctgcctcccgggttcaagcagttctcctgcctcagcctcccaagtagctggtgttacaggcatctgccaccacacctggctaatttttgtatttttagtagagacggggtttcaccatactggccagcctggtcttgaattcctgacctcgtgatctgcccgccttcgcctcccaaagtgctgagattacaggcatgagccactgtgcccagccctaattttcacatttttagtagagatggggtttcaacatgttggccaggctggtcttgaactcctgacctcaagtgatccacccaccttggcctcccaaagtgctgggattacagacgtgagccactgcacctggccctatgagttccttttttctgtggaaggtaccatcttcatttgactatgcccatcaaaatttttcctggccagacacgatggttcaaacctgtaatcccagcactttgggaggccaaatcgagtagatctcttgatcccaggagttcgagagcagcctggccaacatggtgagacccccgtctctacaaaatataaaaaaattagctgggtgtggtggtgtattcctgtagtcccagctacttggggaattgaagtgggaggacctttctcctcccgaaaggtggaggttgcaaatgacctgagataacaccaccacactccatccaccttgggtaatagagtaagactctgttttgtttgtttgtttgtttgtttgtttgtttgtttgttttgagacagagtcccgctctgtcatccaggctggagtgcagtggcgccatctcggcttactgcaagctccgcctcccgggttcatgccattctgctgcctcagcctgccaaatagctgggactacaggcgcccaccaccacgcccggctaactttttgtatttttagtagagacggggtttcaccgtgttagccaggatgggctcgatctcctgacctcgtgatctacccgcctcggcctcccaaagtgctgggattacaggtatgagccactgtgcctggcctgagtaagaccctgtttcaaagaaaaaaaattttttccttttgctttctagttggagaccaactaaaccaagcctgtatttaagagcatatggttgaaagattaactctggaagcagatggacatcagtttgaatccctatttgcctcttcttaaccgcgtgactgggccgggcgtgctggctcacgcctgtaatcccagcactctgggaggctgaggcaggcagatcacaaggtcaggagatcgccaccatcctggctaacacggtgaaaccccgtctctactaaaaatataaaaaattagctgggcatggtggcaggtgcctgtagtcacagctactcgggaggctgaggcaggagaatggcgtgaacccaggaggcagaggttgcaatgagccgagatcgtgccactgcactccagcctgggcgacagagcgagactccttctcaaaaaaaaaacagaacaaaactgtgtggcttatgcaagtcactagaactctctgagcttgtttttccacctgtaaaatgaagataatactatttactttacagacttgtatgataagatgaagtataagaagcccagcatagtatttggcatgtagtacgtgctcagtaaacacgtaaataaaaataagtaggccagctatggtggctcatgccttttttaatcccagcacttcgggaggctgatgaaggaggattgcttgagcccaggagttcgagacctggttaacatagggaaacacaccatctttttttttttttgagacagagtctcgctgtgtcacccaggctggagtgcagtggcacgatctcaactgactgcaacctccacctcctgggttcaagcgattctcctgcctcagcctcccgagtagagtagctgggactacaggcatgtgccatcatacccggctaatttttgtatttttagtagagactgggtttcgccatgttggccaggctggtctcgaatgcctgacctcaagtgatctgcccacctcagcctcccaaagtgctgggattacaggcgtgagccaccatgcccggccgaccccatctcttaaaaaaagaaaaaaaaaaaaagaaaagaaaagaaaaaaggataggtaggtgtggtggcatgtgctggtagccctggctactcagcgggaggcagaggtgggaggatcacttgagcccaggaggccaaggctacagtcagctgtgatcataccattgcattcccacctgggtgactaagtgagatcctgcctcaaaataaagtaagtaactaagtaagtaaactttaatgtctttttactgagttaaaagcacaaagtacccaattcccttcgtcagggttttcatcacatagcccaaacatatcaccttggggtgtagtgtcttcctttatccctgaagaatatgagacctgttcatcatttgtcttcctattccacaggcaggcccaatgccgaaacacattgcattcataatggacgggaaccgtcgctatgccaagaagtgccaggtggagcggcaggaaggccactcacagggcttcaacaagctagctgaggtgggtgtgtatggcagagcccaaagtgaacagtctgtggagaggtagattatagctagaaaaccaggctctgagtttgctgtggttggagagtgttttttgtatctgtctctgtgttttattgtttgcttgctagctatagatctcatcttgacattggccagacgtggttgcttttgcctctaatcccacactttgggaggccaaggcaggaggattgcttgagcccaggggttcaggactagcccgggtaacatagtcagaccctgtctctacaaaaaaatttaaaaattagccagacttgatggtgcacacctgtgcccccagctactcaggaggctgaggtgggaggactatctgagcccaggaagcttgaggctgcagtgaatagagattgtgcccctgtactctagcctgggtgacagagtgacaccatctcaagaaaaaaaaaatgacattaacaaagaagtaatcatccagtgaatgaccataaaatactggaaataagaacaaaattgcctcttcttattttaataaatcaatagtttatattttatgcctcatccaatccttattgtatgctctacgtgacttaacattaataaaattgcatctgtagcttcagtaaccttattttcacttaacattttggttttgtttatttgtttgagacagtctcactctgttgcccaggccagagtacagtgcatgatctctgctcacggcaacctccgcctcccgggttcaagtgattttctgcctcagcctcctgagtagttgagattgaacacccgtcaccatgtccaactaatttttttgtatttttagtagagatggggtttcaccatgttggccaggctggtctcgaactcctgacctcaggtgatccacccccttcagcctcccaaagtgctgggattacaggcatgagccactgcacccggccaacatttggggaggcattttttaaggtgtatatataagctttctatctgtatctttcaatgactgtagaacattttatcaagaggatctgatataatttaactgctccactattacttgacattacaataaacattataaatagtactgtttcagcctgggcaacatggtgagatcctgtctctacaaaacaaaaaaaaaaattagccaagcatgatggtgcatgcctgtggtcccagctacttacgagactgaggtggaaggatgacttgaaccctggaggttgaggctgcagtgagctgtgttcacgtcaccgcaatccaacctggtgacagagcaagaccttgtctaaaaaaaaaaagtactctttttggataaattcttagaagtgacatttctggacgaacattgagtgactactcattctgctttgccaaggctgaggggtttctcaggacacaggtctttcagtgctaaaactggtgaaagtccccggcaaaccaggacatcactctacacagaggtcatgaacattttatggtataatgcatgttataaattggaagacattaagtttaacaaaagaatggaatatgacaatcttggtgaaatttttaagaagaatggagggccgggcgcggtggcttacgcctgtaatcccagcactttgggaggctgaggtgcgcggatcatgaggtcaggagatcaagaccatcgtggctaacacggtgaaaccccatctctattaaaaatacaaaaagttagccgggcgtggtggcgggcacctgtagtcccagctactcgggaggctgaggcaggagaatggcatgaacccaggaggcggagcttacagtgagccaagattgtgccactgcactccgcctgggcaacagagtgagactccgtctcaaaaaaaataaataaataaaagaatggaaatatggtctgtagttcacaggtcccagtgtcctagcacagggacacagtttgatgccagggccgtgatatttttttccttgagtgaatggcagtgaggttctcaccagaaccttgtagaagtctttacgtttgttgactccagcttctcttttgtaactgagaggcagttttgcctaatgcttaggagcttgagctctggagtcactcagaattcattggcacccctgctttgtcactgtctggctttgtgacctgcagcgagttatgtagcttccctttgcctcagtttcttcatctataaaatggggttagcaatctctatctcagtagattatttgaagataaataagatggcacaatgaaaagcatgtagcacaggccctgacctaaaggaagtactcaaaaaattgaaacttgttattagcaactgtattgactgatgtcagtggtgggttccaacccagatgtgccatccacagtggctgccttgcaaggtctttagggcctgaggctattcaagtgtcaggttctcactggcaattttcctaagatgacagtagatttgtttgcttgtatgtttgttaaggggttagagaggcagctcttcagcttgtttcttctgttctgtttgaatgtcttctgttgtctacgtttaacctcccgctctccatctctcaacattgtcctccacctctcaacattgttctccacctttagtggtacaggattagagcagccccaaaggactaagttttcttctttttttttttttttgagacggagtgttgctctgtcacccaggctggggtgcagtggcgcgatctcagttcactgcaacctccgcctcccaggttcaagcgattctcctgcctcagcctcctgagtaactgggattacaggcctgcgccaccacacccggctaatttttgcatttttagtagagacggggtttcaccacgttggtcaggctggtcttgaactcctgacctcgtgatccgcctgccttggcctcccaaagtgctgggattataggtgtgagccaccacgcccggcctgtttttttttgagttgaagtctcactctgtagtctaggctggagtgcagtggtgagatctccactcactggttcaagcgattctcctgcctcagcctcccaagtagctgggaatacaggtgtgcgccaccgcacccagctaagtttctgtatttttagtagaaatggggtttcaccatgttggccaggctgggcttgaactcccaacctcaggtaatctgcccaccttggcctcccaaagtgctagggttataggagagacccaccacacccagccagtttcatttctttttgagttataatttcatatggtgaactgcacagattttaggttttgacaattgcatttatttatctaacccatacccctgtcaagatataggacatttcctgccgggctcagtagctcatgcctgtaatcccagcacttcgggaggccaaggcaggcaatcacctgaggtcaggagttcgagaccagcctggtcagcatggcgaaaccccatctctactaaaaatacaaaaagttagccagatgtggtggcacatgcctgtaggcccagctactcgggaggctgaggcaggagaatcacttgaacgtaggaggtggaggttgtagtgagccaagattgcaccactgcactccagcctgggtgacagagcaagactccagcttaaaaaaaaaaaaaaaaaaagatgtaggacatttccatctctccaaaaaaattccctggtgccccttctcaatcaacttctgttctacctcctccttttcctctctaggcaactaccgttctgatttctgtaactataaatttgtttttcccattctagaactccatataatggaatcagacagttgaggatttttgacatattcttcaactctgagcctgttttatcatttgtaaagtaggcatgaaaacagtagtgtcattttaaagtggttgttcaaagaatcaaatgaaattatgtgaaaaccctttgcaggctattaaatgctacacagctgtccagttgttgctttttttcttttaactcagcctctcaacctaccagaataatgaagttatgctgtgagtaataacaccttgtgtttttatattgttcgttagccaccttgtaagggatggattgtgatcccatattacaggtaaggagacttcaacctagagaaattaaatgatttgattccagtcacataagtgcatgctggagtcagggactagagcctatgtctttacactctcagtgcagagttctttcttgtagtgcacaatgccatcagcattcactaagatcacatttttcagtttcttcaatggtggttttctgcttatttgatgcattaattctgacataaacactgatgttatcctagcttcacccagctttggggaggagaaaagtctgtctcctatctccaactctgagtcaggaccaaaaagtatctcttatttccccttcccactcttccttgtatcctagctccttgccttctcccctctcagactctgcggtggtgtttgaacctgggcatcctagaggtgacagtctacgcattcagcattgagaacttcaaacgctccaagagtgaggtagacgggcttatggatctggcccggcagaagttcagccgcttgatggaagaaaagtaagatgctatcagaggggagagcatgttcttccaccacccccagccttatcctaacccttgaaattctgttatctgaggcttacttaagggacttgcaactctttttaatgttagttagatatcttgggtggcaaatatcagaaatacaagatagtctttcattctttatttctaactttttaataaaaaagggggcatttatttgaggatattgaggggtgtcacatgatttaagaacaagtacagccagcctcaagcaaaactgaaaccaggaattaaacccactaggtagaacctctgtattcatttatttccacctctctctgcagaccagttttctcttgcttcaaaagagcagcctggaatcaataaaatcccttaattgggatccctaaattctatcagatttctaccccagagccaataaactatggccaaggaagtggagttaaagaaaacattgaggaagtcattttctgctgcacagtgaaccctaaaaagttactgtactccccctgcatagtcttttgggagggataggatgatgcataagagacatttatggggaagcatcagtaccattcttagctgtcagtaagtttaggcttaacttagggaataaagccagagaggggcaaagacaaatttcagtggagactgcttgcttcaaagtatggagcccttaccagccagaattgcccgaaagtcttagttacaactgttgtgtgcccagctcctacctgtaccaggaagatgagagaacagtgagcctagaactccagtgaagatgagcctagaacaatgggtggtagggagggtagccaggcttccttctgtctatattaggatggtgagactctgggctacagacattgctccccggtccccagcagagcctgtgtggctcagagtttacacctaaggagccggggatggaggcatggggggcatatcccactaatcttacctttttaaagtgtttactatatgccaggctttgagcctaaaatatattcttactcatcctgtaatcacattataccatgacaaagatattattagccaatttttagagagaaggaaagtagttaaccaaagaagttaaggcatatatcctgggtcacacagctatcagacaggcagagccaaggtgcacacctggatctttttgactccagagctgagctatcatctactacactgtgctctgagagacagaccatattacaattcctgcaagatcaaaacgcatggcagaagagatgctaatgagattgcgctgatcagttagtagtagagaaaatggtcttcgtttatcatgaagtcctggcaaaagcaagaagaaactcagaggtgcttttccattaatgtgccacagaaccccaaggtctgaggaggtgtagaaagaacctagtgggaatggggtagggggtgctgagttgcatttacctattttatgtgttgggcttctgtgtagaatttgatttgaagaaagggttctttggctaaaagaaggtgggaaaaccactggcctgattctgtttcatcagttgggaaactaaaccctagtaaagagaagaggttgagcaaggtggctcatgcctgtaatctcagcactttgggaagccaaggagggtacattgcttgagtccaggaatttgcttgattccagcctaggcaacatggcaaaaccccatctctacaaaaaaatacaaaaaaattaactggggatggtggcacatgcctataatcccagctatgtgggaggctgaagtggggggatcactgtgatgagcctggggagtctgaggctgcaatgagctgtgatcgatccactatgctccatcctgtgcaacagatcgagaccctgtctcagaaaaaataattaaaaataagtaaattaaaattttaaaaaacagaagacaagagcttacacatggtcacacatcaaactagtggcagaactataccacaagctagcaggaggagctgaatcaaggtcttctagtatactgccttcaattaatctcccattttccaaatgtgaagcattcggtttcttcatagcatttccagatgagagaagctggctgaattcattctcactgtatgcagagtttgggagttattgtatggaagcaatataatgtcataattaagaagacaagctctggaggctgactccctacgtgcaaatcctggttctccatcagctgtccaaacaaattacctaacgtccctgtgcctcagtttcctcatctgtaaaaggggaataataagggtatataactcagaggttggtgtaaggatggaatgtgttggtacatgtaaagcacttagaccaatatctggcatttagtaaacatagaatgttagctgtcaccattatcataatatttcactagaacataacaaaagtaccccataatacagctccttcccttgaggagtttactcacttctcaaatgggacaaacttcacagatacataaaatgcaactgcccaaaaaggacacatgaggtcgtgtaatgtatagtaaagagtttgggttcttgctggacatggtggctcacacctgtaatcctagcactttgggaggctcaggcaggaggatcacttgaggccaggagtttgagaccaccttgggcaacatagtgagacctcatctttacaaaaaatacaaaaattagccaggcatggtggtgcatgcctttagtcccagctacttgggaggctgaggcaggaggatcgcttgagcccaggatttggaagttaacactgaaccatgagtataccactgcactccagcctgggtgagagtaagaccctgtctccaaaaaaggggaaaaaaaaatgtagtttggggctgagcgcagtggctcatgcctgtaatctcagcacttgggaggccgagacaggcagatcacttgaggtcaagggttcgagaccagcctggccaacatggtgaaacctcatctctactaaaaatataaaaattagccaggcctggtggtgggcacctgtaatcccagctacttgggaggctgcggtgggaggatcgcttaaacccgggatgcggaggttgcagtgagctgagattgcgccactgcactccagcctgggtgacagagcaagcctccatctcaagaaaaagaatttgggttctcaaatcagacaaactgggtttcaatcctgacaaagcacttgatggctatatgaccctgggcagtccctatctgactgtcctgtctgagccttggcactgaagtaagtttctttcagagttgttgaagggatgcaatgaaataatgcatgtagaacagggtctgacacacaggaaagcactcaaaaaactggtggtcagttattacctgagcaccttgctctctccagctcagcaggggccctatcccaatgctgcctcttttccctgatcagggagaaactgcagaagcatggggtgtgtatccgggtcctgggcgatctgcacttgttgcccttggatctccaggagctgattgcacaagctgtacaggccacgaagaactacaacaagtaagttctcagatttccctatagggagctgtttcaatctttgattccctgctggctttagggagacgtcctgggctttccttggtctggattggtgcaaggggcaatgagagagtaggttgagcagcttagagactttctccgtctgcagggcacaccagacatgattctgcaataacatgttatatgtgtgtatactgacacatacacatagtttctctttcctcctttctctgcccagcccccaccaaataagtgtgtgtgtgtgtgtgtgtgggtgtgtttttacttgacagggaatgggatcggaatacagcagttcttatccctgactttgaagacagatccttcaagaaattcttgttctgttccactcctttaacctatggataggatgaccttgggaggtcatacagatgtacaggggaatagagttcaataatccaaactctgtgatgtgtagctttgaaatataacgtgtattttggcagtggacttgttttacatcaaatctccttcctattttcctttgtttgtgccaatatcacagtagagtcttcctctgaaagccggtgtacagtagaaggggagagggttaggacggcaataggagctatttggtggctgggcacagtggctcacgcctgtcatcctaggcaggtggatcacctgaagtcaggagttcaagactagcctggccaacatggtgaaaccccatctctactaaaaatacaaaaattagccaggtgtggtggtgtgcacctgtaatcccagctactcgggaggctgaggcagaagaatcgcttgaacccaggaggcagaggttgcagtgagtcgagatcacgccattgcacttcagcctgggcgacaagagcaaaactctgtctcaaaaaaaaaaggagccatttagtatttgtcttattataaaactagttacatgtttattccaagaaaacttggaaaccacaaaaaactcataatttcacctttcagaggtatccacaattaacatttgatgtgtatttgtttttctagggaaaggctggaagggcttctctgtaatcagtgacttcaatcatcagtccctgtccccctttggtaaattattctcttcttccctcctcaggtgtttcctgaatgtctgttttgcatacacatcccgtcatgagatcagcaatgctgtgagagagatggcctggggggtggagcaaggcctgttggatcccaggtatcccgagttgttttgcatggtaattgttaaggaaaacaggcctgggccagcatggcagctcacgcctgtaatcctagcacattaggaggccgaggtgggcagtccacttgaggcaggccaggagttcaagaccagcctggccaacatggcaaaactccctcttttcaacaacaacaacaaaaaagcaggcctgtaccaaaccataaagcccctctgtgccatgtacttggccagaggtctaattaggggagcatgtggaaagatttaaggggatctcccaaatttagagattaggattggcttattacaacctgcttcagaactagagttcaccacacaccaagaaaccccagagaaagagcaaagcagatgacaaagccatgttattattcctttacaaattataccctcctggccctttggtagtgtttttccaagaatgacttttcatgaatgcagtttgttggggctagagttctttaggtctctcatgttctagttccacacaagattcaggtgtttttcttttcttttttttttttttttttggtgaggcaaagtctcactctgttgcccaggctggagttgcaacctccacctcccaggttcaagcaattcttccgcctcagcctcccaagcagctgggactacaggtgcatgccaccatgcccagctaatttttgtattttcagtcgagacaggtttcaccatattggccaggctagtctcgaactcctgacgtcgtgatctgcctgcctcagcctcccaaagtgctgggattacaggcgtgagtcaccatgcccagccgattcagggatttttcaaaaagaaaattattaattattgtcaacatagtggaatcctaattattaaaggtggagagacttttgaagccatttaaatatttggtccctctcatgttattatttatgtaacttttaatatatttgtaaactaacagcaatagtaaaataatagtagcaaaaaataacccaggagatgtgttgtgttctgtatttcattaagtcattaaccttatgtgtgagagattcaaggctgttgtccattgtgtagatgagaaaactgagttcagcattgaagtgacttgcccagggtcactctactagtaagtgccagagctgggactcatatctaaagctgtttgattttagggttcttatcctttacctctattatgtgggatcttgggaagcaggaatttttctggttcccttcccgattcgattgacctaggaaactagattaaaaatcaaaaagttacttggtgagaatagaattagataaaaaggagaggagacagtttttgaggctattttatgaatgcctctccttcctaacagctgggtgacatttctctgtcacatagttcattcattcaacaaatattttatttttatttatttatttttattttttattttatttatttttttgagatggagtctcgctctgtctccaggctggagtgcaatggcgagatcttggctcactgcaacctccgcttcccaggttccagcaattcttccacctcagcttcccaagtagctgggattacaggcgcccaccaccgtgcccagctaattttttgtattttttagtagagacggggtttcaccatgttggcgaggctggtcttgaactcccaacctcaagtgatctgtctgcctcagcctcccaaagtgctgagattccaggcatgagccatcactcctggcccatttttatttttattttgagacagggactcactctatcgcccaggctggcgtgcagtggtgtgatctcggcccactgtagtctgtgcctcccgggcccaagcagtcctcccacttcagccttccaagtagctgggactacaggtgtgtgccaccatgctcagctaattctttttttggagacagagtctcactcttgcccaggctggaatgcaatggtacaatctcggctcactgcaacctccgcctcctgggctcaagcgattcttctgcctcagcctcctgagtagctgggattacaggggcatgccaccatgcccagctaatttttgtatttttagtagagacggggtttcactatgttggccaggctggtctcaaactccccacctcaggtaatccgcccacctcggcctcccaaagtgctgggattacaggcgtgagccaccgcgcccggcggttttagacttacgttacagtggatagtggtgcccttcaccatgctaggtaaccctgagagaaaatccagttgaaaagggtcagcagtttggttttggatatcctgtacatgttgaacagagatgtcaggtcaacagttcagcgagggattggtatagtcaggtcaacagtcagacagagatgtcaggtcaacagttcagacagggtttatctctgtcgccagtatggaagccatctgtgtataggttaacttgagcaaagaggggatgagaaagctaaggagagtctgtctgtctatctgtgtatttatctatttagagatggtctcacactgtctcctgggctggagtgcagtggggcaatcaaagctcactgaagcttggaactcctggtctcaaaggagcctctcaagtacccagtactacagacgtgcaccacctacccagctaactttttatatttattttttgtaaaaacagggtctgactttgttgcccaggatggtcttgaactcctggcctcaagtggtcttcttgccctggcctcccaaaatgctgagattacaggtgtgagccactcagccctgcctgttaaggagtgtagagtgagaagaagaaagagcctaagatggcatttttgaggaactctaccctttactggctgggtagaggagaataagctttataagcaaaaacacagaaaagcaggaagaaaaccagggcagccagcattacataagccaagaaaagagggagtttgttggtgcaagttgggaaggggtagggcacccatggaaacaatggtgtcaaatgctgtagagaggtcaattaagatgtagagtgaaaatcagctgttgttaaaacaattaagagactggtggagttagcagaggtagagagcaggcaggaagatgagacagaaaaggggtatagaaatagaagcatgttttcaataaaattcttagtttggaggtactttcgtagttcattatatttttgtgctttataatgaatatgtttcaaatattcttgtatgtatgaaataaatattaaggcacaagggttgacactagaatgaaagaaagccatttgacaagcagatctaatatgcattatgcctaggactctgatcttgactcctagtccagcatgctttaccctcataccacattacagtaaccactaccttatctcctgcttcttgtccagcaagtttttccatatccttctctgtcctgcatggtttagtaacttgcctctgtggggttagttatgcagacagggtgtgggttgggcagtatcaccagggtcaggaggccaatgtctcaacccaccaactcctgaagcttggtgtgctcagactgggctaatcagggcctgaggcgttacactttatattattcgaatttagacaaacctgcatttataacaaagtcagtgcgttaattacaattaggtcctatgcttctaatagctggaattttcctgatttctcactatcaccatccaactcctcatttttctttcttccagggtatgtatgtagatgtgtgtgtgtgtgtgtgtgtgtgtgtgtgtgtgtgtgtgtgtgtgtatttttgtttttttgtttttctgagatggagtcttgctctgttgcccagggtgaagtgcagtggcacgctctcaactcactgcaacctccaccttataggttcaagcagttttcgtgcttcagcctcctgagtagccaggattataggtgcacaccaccacacccggctatttttttttctttttttttttttttgagacagagtctcgctctgtcgcccaggctggagtgcagtggcacaatctcagctcactacaacctctgcctcccgggttcacgccattctcctgcctcagcctcctgagtaactgggactacaggcgcctgccaccccgcctggctaatttttttatatttttagtagagacgggtttcaccatgttagccaggatggtctcgatctcctgacctcgtgatctgcctgcctcggcctcccaaagtgctgggatcacacccggctattttttgtatatttagtagagatgggatttcaccatgttgaccaggctgatctcgaactcctgacctcaagtgatctgcccaccttggcctcccaaagtcctgggattataggtgtgagccatagcacctggcctgtttcgttttgtttttgagacagggtttcactctgttgctgaggctgaagtgcagtggtatgaacatggctcactgcagcctagacctcctgggctcaagagatccttccacctcagcttcctgagtatctgggaccacagatactgctaccacatctggctaattttttgactttgtagagacagggtcttgccatgttgtccaggctggtctcaaactcctgggctcaagtgatcctcctgccttggcctcccaaagtgctgggattacaggtttgaaccacggcacctgaccgaggtatatatgtatttttttagcagttaaattaatagattgttttgtgagtctggaaattatagaagaaggaagtagattgagaccaaaggatagttaataaattctattccaccgtgttaccttgaacgggctacttgattccctgtaggcctctgtctttcttataaaacaatagtgttaatagtaattgctaacacttactgagcatttactctgttccaagcattaagtattccacatacatttatccttagaccctataaggtagatactgtttttatgcccattttaaagatgagaatactgagacatggagaggaaaagtaacttgtgcaagttcacatagttggcaaacctgggggccaagatttcaacctggcttcagagcctgtgttctcattcactgtggcatattgacttcctcatagcaaagctgaaatgaacaataaggcagtaaaaaagaaaaaaattagatggacatggtgacttatgcctgtaatcccaggactttgggaggctgaggcaggaaaatcgcttgagccctggagtttgagaccagccctggcaacacggcaagaccctgtctctacaaaaataaaacagttagctgggtgtgctggcacacacctgtagctacttgggaggctgagtgaggaggattacttgagcctagcaggtcgaggctgcaatgagctatggttgcgccattgctctctagcctgaacaacagagtgaaaccctgtctgaaacacacacacacacacacacacacacacactcacttttgacataaatatttataacacatgaaatcacataatgaatagtttacactctgaatcatgcttttatcattcaatgttacgagtacttttcatgacccgtgtttttaataattcttcatatcattatttataatggctgtaaaatatatcttgtgttaatttctttaaccagtcttctatttgttgggtatataggcagtttaatatttcattattacaaataatgccacaattaaatctttgactgaacttgcctgcattttttattgtttcctcaggatctgagtttgaaagtgctcatttcaccttattcttgccaagattttttaaatgtaaactgttctgaccaggtgcagtggctcatacctgtaatccagcactttaggtggctgaggcaggttggatcgcttgagctcataagttcgagaccagcctgggcaaaatggtaaaatctcgtctctaaaagtacaaaaattacctgagtgtggtggcatgcacctatagtcacagctacttgggaggctgaggtggaaggatggcttgagcccaggaggctgaggctgcagtgagccaagatcacatcactgcactccagtctgggtaacagccagatcctgtctcaaaaaataaaacaaaaaaataaacctattctcataggtaaaaactgatattttaccgttatttaatgtaaatcatttccgaaaagtcttcacgtagacagctttaactcaccattccatttagtgatggatttttgttggccaaagtctacagatgttccattttgattttgtcagtttcatctttccaccctagagttaacccctttttttttgtttttgagatggagtcttgctctgtcacccaggctggagtgcagtggtgcaatctcggctcactacaagctccgcctcccgggttcacgccattctcctgcctcagcctcccgagtagctgggactacaggcgcccaccaccacgcccggctaattttttgtatttttagtagagacagggtttcatcgtgttagccaggatggtctcgacctcctgacctcatgatctgcccgcctcggcctcccaaagtgctgggattacaggcgtgagccaccgcgcctggccaacccctttgtttttttgagacacagtctgctgtatcactcaggctggaatgcactggcacaatatcagctttttccattaagaattctgcccactgcagaattcttactgcatacctactgcctaaagtaggtagaagaaactctttgcagataaattgtaaactcagagagactgagtctctgaagtcacactgcaagttggtgggactgaaaataattttttattattattctttatatagcactttatagttcccaaagtgcactcaaatctattatttcatttgatttgaccctcatgataacctataaggtggataggacaaatgggccctgtttttttttttcccttttaattacatttattttaatgctgaatttactcctgtgccataagtttttgtttcttcagtttctttgggatatcattttcttctgggcaacctcctcttctggtttaggaacaatctgttccttttcagtaaggatcatctcaatgtggcagggagagctcatggatgggttaatccaaccatgagctctgtaggtccagcggcacatcttaggtgctttgttcacttggatatgctcaatgaccagagaatctacatttaaacccttaagttcagcattactctctgcatttttaagcatgtgcagcaaaaattcagcactctttttgggccactgaccttgtgtccagccccactgcttggcctgggcacacctgccagctccaccattgtaacgtcggaatggtacgcactgtttctgtaaagtgacatctttcaggtacttcatggcttttcgtatatgcatacccttgatggcctgggcagtttcacgaatattcttaaagtaaacacgaagattggaacctcttgatttgcatgatatcatgaggttctccgggttaagtgaatagtgaaccattttcacagattacctcaggccgcttagggaaagagcaaatgggcccattttaaagataagagaatgagaaattatatggattgtacagagtctcacataacttggagaattaagaccatgctgccaagacaagattgtcagattaccagagaaatctgaaccagagcccttcttattgctcaattataagtgaatactgtttcctctgtgatgatgatacggaaaagaaagctctctctgtggtttgccttaaaggactgagagagatgagcaacttggctgggtgcagtggctcacacctgtaatcccagcactttgggaggccgaggcaggcagatcacttgagctcaggaattcaagaccagcctggccaacatggtaaaaccccgtctttactcaaagtacaaaaattagccgggtgtggtggtggctgcctgtagtcccagctacttgggaggctgaggcaagagaatcacttgaacccgagaggtggaggttgcgggagccaagattgcgccactgcactccagcctgggtgacagcgcaagactccatctccaaaaaaaagatgaataacttgcctaaagacacacaactagtaagtgtagagtctggttttgaacactcagcccagatctttctgctttcctgaccatgcgtccagaaacatgttcccaccaagaaatttttgtcttctggaccctttccaagatgtaactctaactacctggacattctgaattctgcttctgggtagttggtaggacaggtaaacagcattcttggagccaacagacaccagccatgcaaataccctctttctgtggacaggatagttttacttaagataaatgcttccactcaccagttttcttcaattctatctcctttctgaccatctctgtgcttgggaaagtagctcttatcaaacacaggagaactgatcatattgctgtttatttaaaatccggtgtaatgtggaatttttgcaatgtttcaggatccatatgacttaaataagattttaaaaataaattagctgagcatggtgttgcacacctgtggtcctagctacttgggaagctgaggtaggaggattgcttgagcatggaaggtggaggttgcagtgagctgagatcacaccactgcactccagtctgggcaacagagggagaccctgtctggaaaaaaaataaaatatgttttctgtttttttttgttttgagacagagcctcgctctgtcactcaggctggagttcagtggcataatctgggcttactgtaacctccacctcctgggttcaagcgattctcctgcttcagcctcccaagtagctgggactacaggcatgcggcaccacacccagctaatttttgtacttttggtagagatggggtttcaccttgttggccaggctggtctcaaactcctgatcgcaggtgatctgcctgcctcagcctcccaaagtactgggattacaggcatgagtcaccacgcctggccaaaaaaagttatttacataaattcaaacaataacagaagtacataaagtaaaaagaaatagtcttttcttccttacttcttatccaatccactgttaatagtatgatgtatctttttagactttgttctttatgtatacttatatgcacgtgtgaatgtttgaatgtgtgtgtatgttttatactatatattctctgaaacttgccttttacatttaacattagattttggacatctttccaaatcagtgcatttagatttatctttatttttagaatgcagttgcatagtatttcatcaaatactgggccataggatgtatgtatgtattttaaaaaacaagatgtttttagcaaaagacaacagatatttttgtgggtgcatctggttttaggcctgaggctaaatgactttcagcaaattattcatctttgagcctcagtttccttatctataaaatgaggatagaaataccttatgtatctgctgagcatggtggctcatgcctgtaatcccagcactttcagaggccgaggggggggcggatcacgaggtcaggagatcgagtccatcctggctaacatggtgaaaccctgtctctactaaaaatacaaaaaaaaaaaaaaacaaattagcagggtgtggtggcgggcacctgtagtcccagctactcgggaggctgaggcagaatggcatgaacctgggaggcagagtttgcagtgagccgagatcgtgccactgcactccagcctggggaacagtgtgagactctatctcaaataaataaataaataaataaataccttatgtatcagaacatgtcaaaaaaggcaaaaaataaaaaagagaaaagaattttacattgtattctctaaaaaaaaaaaaaaaaaagaaataccttatgtagttgtgaagatttaaattcattcattaatttagcaaacattttttgagggccttctgtgtagtattggctagtgtatttgatggtattgtataaactgagaagcctatatatggaagttcaccatgagaacactacagaaagagaatactacaggatgtgtgcctctctttgtctcttcttgctcatcttagtgatatctctgagtctctgcttgataagtgcctctataccaaccgctctcctcatcctgacatcttgatacggacttctggagaagtgcggctgagtgacttcttgctatggcaggtaggtcatttccaagtactattatgtttgtgtcatggggaaaccaactgtatccacagaatggatcagagtggtccatccccactcccaaacaggctggggccagagtacttctggggaaagctaaaatctggagaagcatctctaggctgtgtctcataatatttgatgtccattcctcatctgtcgctggctttgcgaatccaactatagtgaaaacttcattgtgccgcttttcaaggaatgggacttctgtcttgcatccctgagcgtaagctcttgccttggtaacctgccagggaccctagcccctctgggttggaagcttgccttgcagttactagtccctccccttcaggataaagggccatacctatgcaagcatggtaaacaatatgcaaacactcaagtctctatcccctgttaacttggtccctggagagcacataactaggggaagtccttgttctgggagagactccatttggaagcagctcacatgataaagctccagaaattttaatggaccacaatcttaaaagtgagctaacgcagggcgtggtggctcacgcctgtaatcctagcactttgggaggctgaggcaggcagatcacttgaggtcaggagtttgagaccagtccagccaacatggtgaacccctgtctctactaaaaatacagaaattagcctggcatggtggcaggtgcctgtagtcccagctacttaggtgaatgaggtgggagaatcacttgaacctaggaggcagaggttgcagtgaggcgagatcgtgccactgcactccagcctgggcaacagagtgagactctgtcgcaaaaaaaaaaaaaaaaaaagaaaagaaataagtacaatgtgcacctattggttctgtggcccactgtgctgctcagatcacgtttgggaagtttactgatgggctgaattttaagagactacagagtcagttactcagtgtacagaattagttacattgacaaacttgaggacttactggaagaggccaaactggaaagcaaggaatctcatgtcttacaaaaaatgaggaaaggatagtggtctgcaaaagggaaataagtgacaatgtattcccttggaaaaaagtgttgagttccttctttatgctggaaatatggcagtgagtgagtcagaaatgatccctactgtcttgaaacttatagtttgctagcaaagacaaactctgaacaagtcattacaactttgggaactgataacaggcagctctaatctagccttgaaatacttgaaagaatgtcactttgaagaagaaacaaacttgttccagaaaaaatacctgggaccttagtagaagttgtagggaaggtgacattggtttagcataaaaagccaaacaggctatcggacaactagttatcccccatgaggtactgaattcctcaccactagagatatcaggcagtggctgtcaagagtgttccaaaggggattcttcatcagtgattattattaaagtacacctggctctttgctatgcatatgttatctcatttaatctaaacagtaccctgaaaattaggtattcctattatccagttttacatttgaggaatctcaggccaggtgaaattacccctgctcaaataaatggtaaatggttggagccaaaattcaaagccaggcagtctggctccagagctcatgctctcaaccactgtgccctgctgctggtacttaaaaataacaatggcagctaccatttgttcattggtgacctttatcagacagtatgtcttccagatgccctctaagggccaagagccaataacataatccagatgttatttcatagtcctaaaattggctcttagaaaaatcctggtggaaatgttgatctagtctcgttttagttctgctttaccacaggcaggtgatctggctgcctcaagtgacgcctccccctactagtgaatgaatcagggccagcagcagctgcagctacagctcaggatgcctgtaacattgtcatctctgggcttctgggtcctgcttagcctgctttttccctggaggactgaccagggatgcggcccagcaacatgttactaaatcatactctcctccctacctttcccagacctctcactcctgcctggtgttccaacccgttctgtggccagagtatacattttggaacctcttcgaggccatcctgcagttccagatgaaccatagcgtgcttcaggtaagaaagagttcagggctggccagatgggatgggatggaagaaaagattagcattgattgacaaccaccttactatataccaggcacttcctaataagatgatgataatgatgatagtagctaccacctactgagtatctactacttgtcaggcactgcgaacattttacatgctgcaactcatttaatgttcccaagaacccaatgagggaagtcttattagcccctcccttatgtaagtaagcaaacagaaatgatttagttaaggacacataatcagtaagaggtaggaataggatttgagctacaggtcttttatcttttaaagactcaggaggaaaaggcttctcagagaaactggccattattcctttaaagtattaccctaataaaagatcgtagcagtagggattaagaactaaatagcattgtctttccattgtgtaaacctatgttgtgtcaagacttgaagtttgactttcagttttcatcaccaaatcttgaaacaggttttattagcagtcacctgtatatgattaggtctctttataataatggtagtggtagctaacatatgaggatctacgagggcacttaggtgatttcatgtaagttttcttatttaacctaacaacccagcagttttggtgtcctcatttttcatatatggaaccagaggggcagagagacttaagtaactgtcccaaggaacctgaattttatctttatttatttatttattttgagatggggttttgctcttgttgcccaggccggagtgcagtggtgcgatctgggctcactgcaacctccccctcctgggtttgaacgattctcctgtctcagcctcccaactagctgggattacaggcacacgccaccatgcctggctaatttttgtattttcagtagagacagtgtttcaccatgttggccaggctggtcttgaactcctgacctcaggtgatccgcccaccttggcctcccaaagtgctgggattacaggcgtgaagagcctgaattttaaaatcaaagctggtgctgcttcttcagtctggagagataatgccaggaggaaataatgatgtgagtcagggattcttaatctccttggtattggggtccctttgaataatctaatgaaagccacagaccatctccctagaaaaatcgcagatcactcaaatgtggaattttgcatagaattgtaaacttatcatggaaacacatagaatactttttttttttttttttttgagacggagtttcgctcttgcggcccaggctggagtgcaatggcgcaatctcggctcaccgaaacctccgcctcccgggttcaagtgattctcctgcctcaccctcccgagtagctgggattacaggcatgcgccaccaatcccaactaattttgtatttttaatagagatggggtttctccatgttggtcaggctggtcttgaactctttacctcaggtgatccgcccgccttggcttcccaaagtgatgggattacaggcatgagccaccaagcccggccacacatagaatactttaagggggttcacataactgctgaaatctgcccctgaatcccaagtccataactcctgctataagtaaatcaaatcacaaagacttgatcatgtatttaattacttagtctcagaatatgaggaaattaaaagaagtttagaattagtgaaaagaaaaacagcaaaggcacaattatccactgtcagtggggaatgaatatcagatttttccatatgaccaaagctccctctaaaaactaaaactttacccttttttgatggaaaaatttctaaaatgtatcttgtacataattcattgaaatctatataccaggcacttgctaataatgatgatgattaggataatcacgtgctattttttgtttttttttttttttagcagggtctcactctgttgcccaggctggagtgcagttgtgcaactttggcttacttcagcctcccaagtagctaggactatgggcacacaccaccatgcctggctgatttttgttattttttgtagagataagtcctcactatgttgcccaggctggtcttgaactcttaagctcaagtgatcctcctgcttcggcctccccaggtgctaggattatagacatgagccaccatgcctggccgtcatattctaatgattatgataatagtaattatcatctttaaacacttcattgtacaacaatatccttgaggggtagggctgtttgctctaagttagatggtcccagaatacctgggtttgaggtttcatgtatatttttctgtgtcctccctctttcatttcctactgctgtcaacagttaattttgacagtatctctcctcttccatagtatttactgttttaaatcagctatagacaaggaaaccagatagtcaagcttgttggaattatgtatataaaatgagagtgaactggctctgcatgaagcccaaaggagcttggtgcatgagtttttgtgtttttacctctaattgggctgctcagaagtcttttatagtaatttcacgtttctcagatactttgcatatggttgtcagaggagttaactcaagtttcattcattccataagtatttattgagtagtatgaatcaggcactgtattaggcacaggagagtcaacaggtagccagagggacaagatctctacctttgtggaacttgtattcttgaggagacagaaataaacaagtaaacaaatatataagttccgattgtaataaggcagtgaagaatacagagtgatgtgctagaaagtaatgaagagaatgcaaagagactgaggttaaagtttgggtcttggaagaacaaaaaagaggtcaatgtgccaagggagaagggcaggaaatgaggctagagtcagaccttggctcatatagagccttgtaggtcatggtaacaaagctgaaggactttaatcaggggatgacgggatctgagttgcattttgtaaaaatcattcagaattttcaacgggctggagttaaagccaagagacagaactcctgcagtagtccaggtgagagaggatgcgcctcgaggtagggtggtggcagtagggaaggggaggagtgaagacgggataaaaacaaatgttgaaatagaaacaagtgaaactagctatatcaaggtgataatataactccccagagaaaggaattaattcagcttacctgaacacagttctctgctattcatctttagtggaatttcttttcaggataatacaaactgcaacacaaaattaaacattacttaagaggtttattgttagtggcaatgttggtaatgtaattatgaaactcttgtttctttttttttgaaatggagtttcgctcttgttgcccaggctggagtgcaatggcgtgatctcggctcactgcaacctccgcctcccaggttcaagcgattctcctgcctcagcctcccaagtggctgggattacaggcatgtgccaccacatctggctaattttatatttttagtagagatggggtttctccatgttggtcaggctggtctcaaacccccgacctcaggtgatctgcccgcctcggcctcccaaagtgctgggattacaggcgtgaaccaccgcgaccggcctgaaactcttgtttcttgtaggctaaaacaaataagtacaaataataatgttattaggaaccaagacacttaggttgtggccatagcaattggttgtatagttctgctgtttcctgggatggggtggaaggtgtttgaggtcaactattaagtgttccatttttacctatggatcatatttgcaaacttttttttttttttttttttttttgagacggaatctcactctgtcgctggagaacagtggcatgatctcggctcactgcaacctctgcctcccggattcaagcaattctcctgcctcagcctcccatgtagctgggactacaggcacgtgccaccacgcacaactaatttttgtatttttagtagagacagggtttcaccatgttggccaggctggtctcaaaatcctgacctcaggtgatccacccaccttggcctccgaaagtgctaggattacaggcatgagccgctgcgcccggcctatatttgcaaacttttattgagttcttaccacatgtcaggcatccttccagtattgagttcttaccacatgtcaggcatcctttcagtaaattctgtgaactgctttaaggcagatactattattattgcctctgtttttagagcaaggaatccaaagttataatagagatactgattatcttgaagccttctccagcaggagcccttggaggtcctggccaggctttctctaccccagaagcttcaaagctctgtttctagaaatcatatcaccttggcagatgcactaaggggagaatccagactaacagcatcctcaccagtttgttctcagaccagagaggtctttccaggcttttctcatgtctcccttttacagaccctgtatcatggccaaactggactcttcccagttacctgttccatgccctccagtttcctacctgtatgtctgtgctcttgccccatcacccaaattcccattttaaaatctgagctgctctgtctctaggccctgcccaatgtgtccctattctctgcaggaagccagggcaaggggctaggctctggacctagagtagcttactgagaggaaggcagcgggtggatcgtaagggaagcagggacttggctacaagttgtggggagccagaccttggtatctgaatggaccatgacagtctccaggtggtcacctagccagtcttaaaggctggcaaagggagatcttgactatgatgcagtaggacttgtcagcaaagaggcagggacaaatagagaatcaggccagggagggggtgtgcggcagtgcagagcagctgatcctcaatcacaagttgcatggatggtaggtccttgagaggtcactgatggagatgagtaaaaagtgttcacctcatctccaaggatgatattagagagggaaaagacacatgttcccacgaagcttcctgtagtacatttgtcacaatttaaacgggctggattgaacattatatttcttctgctcttcaggttgtcactatcttctcctcaggataaaagcttgagttatgtatgtatgcatatatgtatgcatgtggaaatggggtctcgccatgttgcccaggctggtcttgagcagctgggctcaagcgagcctcccaccttagcctaaaagcttgagttaatgtctcagacattcatgactttgaatattggcactgcctacatagctatatgactgtacagttacttaacccctcagagtatcattttcctcacctgtaaaatgagagaagtagcgtttacagtaatacctaccttgcaggtttgtgatagggattcagtaagctaacacatgtcaagtgctgagtgcagtggctggaacagagttcattttccaagaatggtggccaatattgttccccacatgtgtgtctcttggcctctcctcagactcctctctggaaaagcaccctgcacatcctgtccccagtacaactccccaggcaaggagactctgagggtgcttcagaacatcatgtttctggtaggaggtgcccttctctgcctgagagcagccctcagaaatgcattcctcatgctgctgacctgggctggctggttgcagcttggggaaggacttttcattggctaatgttttgaagccaaggacctgcagcctctctccaggtgccaacagagtggtagaggacttttagatttaagtactggagggactattacatcttgttctctgattctaccaaggagagaataagagcagagagggataatgcccaggaggaatttagattcataggttagaaccacatttctcaaagtgagcttcttggagcccttgcaccaagattggataaggtctgtacaaaaagtctctaaggaaagaattaacgccctcacttaccctgattggtcattatacaaggatagtagacaaatggtcagggagagaaaagttgacctctaggacttctgttagcttggatttcccaagggtaagtacttgagaagaactggaaacacctctgagattgaaagggtagattcagaccatgtggaagctggatagacaggtatccagatacaggccaccagcttttccacccctagaaagtagagcttatacacaggcacgagatacacttcacattgtcctctcaagaagttatcttagtggagaagccaagggaacttcagccatctcagcctcgctgtcattttctgtaaaatgacgagcagacaccctcccaactctgctatctgaacaatgaactgctaattcctggcagacaggggccaggctctgcctgggctacagcccccattgctggcatgcactctgatgccatctggaagaagcttgcgcctcatgaagtggctttagctagctccatatttcctccctctgttgctgagcgtcccccatcctttctgttctgccagaaacttagactacttagcccagtccacaagtggcggtgatagaacagctaacagttaatagccaagcagtaggctgaaaattcattatctcatttttcctcaaacaacccagtgaggtgggtactcttatcccggttttgcagagtaagagagagccttagagaggtgagggaggccttaggaacttctcaaaccccagtgctccaggtggacttactctggccttaacaggctcttcggttccatgcatctttgctcattactcccactgccagaatattctccctgccccccacacacctcacctctgtttgaatcctcctcattggttaaagggccagctcaaattctgtctgtccatgaaggtcactgctccgtgatgttcatcagccacacttgctttctcctctgaactgcatgacccttaccacatcctattttgcatcgtggcactctgtgtgcatggctgtacaatcagcctgtaagcacctggattgctgggatcgtgtcctgcgcatctccatatcctcaaaaaaaatcctgtatgtagcacccagggagcctcctgaccaaggcctggaagaagcccttccagcaagacggagagctctacggcaactgttcaagcccgaagtcctcatagctccacatgtaattcattgtaatagcagaagagaagtattcttgaatgcctgggattattcaggagccgggggggacagtccagaattctcatttgtcatccttattcatgcagtaaacctttattgctgagagacagcaaatcagttccctgctccatgtctgtctccagcagaaagtacctccctcacagctccattgtgagggtcaagtgaggcaacagatgaagtggttgtgcacatgtaagatattctttaaaccatgaagacagagcagtcaaggtgcttacaggctgattaggacaaaaacatgtatacaagtttatcgtaatacaaggtagaatgtgggaagggtcatcagggtataggataccataggaaaatagagtttctcacacatggaataggtttggcaggaggagctctagtgcaaaggctttgcaggtcagttagactggcaggaacagagaggatcagtgaggcacaggaaagccttggttctgctccaaagggattttccgctcttctgtatcaggagcatcctcactgctctcctgggatcacgtggtcagtcagttgagtgtttcacatgtacagggcaccccaagtgctggagaggaagaagcccagtctctgccctctagtacttgggatgataactgctgccagggagtatgatcaccacctggtgtcagagctggttgcaagaggcttgaaggctctcaaacttccaagggcttattttctaacagaaagagtggattgtgaacactaacacttattctactatgcagaatgcaataagtggcttaagagagttgaacctgcttctcagaatgttcataggggggtcatttgctggaaggatcaggctggtcttcatacaggaggcaagtctggagctctgaaaaatagcctagggagtggggaggatggtaccctcagaggaaaacctggggagatcaaaggaagtgacccaagggacatgtccccgacaagaataggacctttcttgcagcggagaatagacaataacaacttgtaaaattgctgtttctgtctaagagcctgctaatatcctagagaggattttgcatatgttatctctaatccttaaaaccactcttcaaggtaggcacaacccccactttacagatgaagaaatgaggttaggacaggatttgcccaaagacacaaagccagttgatgggggaatcagaagtcagacccacatttgtttggttccaagagcatgagaaaaactttaagaagtacagacgcttccacacaaaacaaaccaagatggacccagaattgccactgccctgcctgtacaacatgagcaccacccactgcatacctactcccaagccttttcaaatctggtacctactttccactgttccacttcacttggcccaccctgtgccccaccccctacctcctccatcccagtttcacccactcctaaaaatgatctccccaccccaatccccacttttctctagcagaaggcccgagacatgtatgcagaggagcggaagaggcagcagctggagagggaccaggctacagtgacagagcagctgctgcgagaggggctccaagccagtggggacgcccagctccgaaggacacgcttgcacaaactctcggccagacgggaagagcgagtccaaggcttcctgcaggccttggaactcaagcgagctgactggctggcccgtctgggcactgcatcagcctgaatgaggctggccacctgccactttgccctgccctctgcctccagggctccactccccttccttttcttggtgaaaggcacctcctttcctgataatgaatggtgttccctttgcttggctggggagccccccaggccaggtttgctggccatagatacctttgggctgcctgggacaggctcctgaggaggattgagggtgaaagtctcccacgagtacactaaacctaggtctggtcaccaatagggtttggagagcaaagggccacaactcatcagctgcctgtctcttagatgcactttctttttccaccagcacatccttcaacacacagaatttcagggaagagttctccccaaaaccctagctctttacccttccattttagccttccacccagcttccacaaaagatttggctctaccttggatctgctagtaaataactaataggcaggcagttatttgggtaaggaaaaaaggggtgggagagacagaaaatttgcccatctgctgctcctcccccttggctctccacctgggatttgctattgaatctctaccctctcccaccacacagtactgattgctcactgaaagactcagcacccccaatggtgcgcggaagccaggcgggcgattacaatccaattacctattgtcgactcagcccacacaagcttttctcctcctcttgcagggcatggggccaggctccactcccaaatgagactggccccctccatggttcagggtaacagaagggcctgtaggccctggtgaactgaatccagcacaggcctcccctgtaacacaacaggactgagcagaaccaaacacttcttccaactgactctgctccctgccctcaccatctcaaactctgattcccactccactcttcgaggtttctctcagctttttgacctggctccctaagtaggccctagatgatttattcttggcatggcaaagcttgttctaggtcctctgcttgtgagggtcaaagctgtgtcctttcccttacctccctctgccaggacttgctgcagagctgctgagaggattagtgcctttgaagagctgtctgcctgagcaactctatttcaggtgccccacaccggcaagtaccagccagcaacaccaaccaaatgctactctctttaaagtccattttccttcttctttttttttttttttttggagacagcatctcaccctgtcctggctggtctcgaactcctgacctcaggtgatccgccggcctcaccctcccaaagtgctgggattacaggcatgagccaccatgccagacttcccattttactttctgcaagctgtttccctagcagctccctctaggggagaggtgaaatcttgcaagttgtagcaagagcacacaggaaacccctaactttcctataccccacccgcctcttcccctttctgtcccgggatacctggcggcaagagacttcttggctattgtccatgctcccagaatcaagcataaatgccagacacggcgattgagaagccaatcagtgaaccctttggcaaagcccccatccacacctggcactcccctctaccaatccctggcacagggttcctggagagcaggtgctgtacattttacagctttacaatggggctgttgacagccataattagggaggcatgaattatgcggctataatgcagagccctacaattaaggcgggaatgaggggctggaggcagcaaacggaatctgccctatgagcgtggctgttgagtcctgtctcctgggtctgactttccgtaatatgattggggtacagtagaggtgattaatggggctggcatctctctttggcctgaggttctgtattctgggaaaggtacacagggtggagtagggagaagctgccccaggaggcgatgtagtggtggaaagaagaggcagagaggtcgtcgtcgtcgcccagcagcaagggctgcaaaatagtagaactcgtggttgctttggacaggtgtgatttgtgcaagccaggttcaacccttgcctcaagaaatcagatgggaccaatttagtgtccttccacctgtgagccaagcccccatttgaggacatctatcgtattcttgtgtgctgggtctcaaatagaatttttaaagattc

SEQ ID NO: 15549 - DNA, 37035 bp, Homo sapiens
actgaagccgtggggacgcgcccagcggagctaatcaggtgccactgaactgaaggggtgaactagaggagaagagggtgactgggcggggagcagctgcgggagaagcaaagggacgactgagggaataatcaggagaccactgaggcgtgaagtactaggcgtgcgataactgaaggagttagtaactgggagcacagagttggaaacagcttaggggaagatggagaaggaagaaacggggaatgatcaagatgtgggcaccatgatgtggcaggaaaccgacttagatgttcagaagaagtcagtgcagatacggaggaaatgggaatgggaagaagtctgcaaagccaggagaaccgaggaaaggcttttgcctccagaggtcacattgcgttataaaactctgggtggtaaaagattataggcttagaccagtgtctttggattctaatgctggctgctctccatagtccatctgattccccagaagtcagttatagctcttcgcaaaccttggtgacttcttattttctttcttgtttatccaagattacctggctggtgtttgcttgttctggagtgatcttctgactggaaaagaactatgtcatggatcaaggaaggagagctgtcactttgggagcggttctgtgccaacatcataaaggtgagcaatggcccagagcaccggttggccttctggtcagttggataatcttatataaaaacctgttattaaagttgatgatgttaagtgcaattcatgatgttaagtggaatttagcaaggaaaccaaagagtcttagaatggtaacttccaggtctacatttctggtagacttttgtcctaactctgatattttctggaagcccaggcctcttaatgtcactgggcagcctagactgctaagtattctttatagagaactgaaatttgtttccctggaacattgatccattgttccatgtactgtcttcttgatttaaataggttaatctttgatatattctttgatctgtcagtagagctgggcccggtcactcacgcctgtaatcccagcaatttgggaggctgaggtgggcagattgtttgagctcaggagttgagaccagcctgggcaacatggcaaaaccccgattctccaaaaaattaaaaaaatagcagggcttggtggtgtgcacctgtagtcccagctactcggaaggctgaagtgggagaatttcttgagcccaggtcaaagctgcagtgagtcatgattgtgccaccacactccagcctgggtgacagaacgggactgtctcaaaaaaaagagttcagaacaagactctgtctcaaaaaaaaaaaaaaaaaaagagtttgggctctagacgcagacaaacatgggtgaaattcctgttcttttttttattttgagatggagtctcgctctgtcgcccaggctggagtgcaatggcgcaatcttggcttactgcaaccttcatctgccaagttcaagcaattctcttgccttagcctcccaagtagctggggttacaggcatatgctaccacacatggctaatttttatatttttagtagagatgggattctcatattggccaggctggtctcgaactcctgacctcaggtgatccacctatctcagcctcccaaagtgctgggattataggactgagccactgcacctggcctgaaagtccagttctatcatttagtaatcatgtgactttaacaactgtagaattatcatgagaatttatgagacattaatataaagcagttagcataatgtctagcagttcttaattattattaggattgtctttcagacatttgaagactattatctcctatcttccccaaatcttccctcagctttttctctaggaatcacagcaatattatatctgcctaagacaggtttgagattggggccagtcagcttggttttgtttttcaaccacaggctgtcaagcagcaggtagtaatgaatttatgagtcagtaacctttatacaagccccacacatgctcacaaacaaatgccaagtgatctcaagcagtccaggaaatgggaagtatctccttggggaaccactgcagtggtatgtttggaagaacaagctgcataacttgaatggattttgggggctggaaaggctgtatgtgagacagaagtagaaaaaggagaagtgttgatgaggaagcagtcagggaagagccctcccaggtgaggaaaaataggctaaggagtccatttgtgttatgggagacaactcaaagctgctccaagccaaataagggttttgttttttgtggtttcttttttgagatgcagtcttactctgttgcccaggctagagtgcagtggtgcagtcttggcttactgcaacctctgtctcctgggttcaagcgattctcccacctcagcctccccaagtagctgggattataggcaccggccaccatgcctggctaattttttttttttttttttttagtagagttggggtttcaccatgttggccaggctggtctcgaactcctggcctcaagtgatctgcccacctcagcctcctaaagtactgggattacaggcttgagccaccacgtccggccccaagtaagttttgtttggctcaaaaaaagtcttttttgtttgctttgaaaaacaatttttttttttcagacagagtctcactctgtcgcccaggctggagtgcagtggcacaatctcagctcactgtaccctctgcctccccggttcaaacaattctcctgcctcagcctcccgagtagctgggattacaggcgctcgccaccacgcccggctaatttttctttatttttagtagagacagggtttcaccattttggccaggctggtcttaaactcctgacctcgtgatccacccgcctcggcctcccaaagtgctgggattacaggcatgagccactgcgcccggctgaaaagcaaaattttaataaaaatcctgatgtttggttttcttgcaagatcaccagatccagcaatgttgtgccccagttcctgtgtgtcagcagttggctagaggtcaggaattagtgcctttttttttttttttttttttttttgagacagagtcttactctgtcacccaggctggagtgcagtggtgctatctcggctcactgcaacctctgcctcccgggttcaagccattctcctgcttcagcctcctaagtagctgggattacaggctcccaccaccacacctggctaatttttgtttttgtttttttcttttttccgagatggagtcttgctctgtcgcccaggctgcagtgtggtggcgtgatcttggctcactgcaacctctgcctcccgggttcaagcagttctcctgcctcagcctcccaagtagctggtgttacaggcatctgccaccacacctggctaatttttgtatttttagtagagacggggtttcaccatactggccagcctggtcttgaattcctgacctcgtgatctgcccgccttcgcctcccaaagtgctgagattacaggcatgagccactgtgcccagccctaattttcacatttttagtagagatggggtttcaacatgttggccaggctggtcttgaactcctgacctcaagtgatccacccaccttggcctcccaaagtgctgggattacagacgtgagccactgcacctggccctatgagttccttttttctgtggaaggtaccatcttcatttgactatgcccatcaaaatttttcctggccagacacgatggttcaaacctgtaatcccagcactttgggaggccaaatcgagtagatctcttgatcccaggagttcgagagcagcctggccaacatggtgagacccccgtctctacaaaatataaaaaaattagctgggtgtggtggtgtattcctgtagtcccagctacttggggaattgaagtgggaggacctttctcctcccgaaaggtggaggttgcaaatgacctgagataacaccaccacactccatccaccttgggtaatagagtaagactctgttttgtttgtttgtttgtttgtttgtttgtttgtttgttttgagacagagtcccgctctgtcatccaggctggagtgcagtggcgccatctcggcttactgcaagctccgcctcccgggttcatgccattctgctgcctcagcctgccaaatagctgggactacaggcgcccaccaccacgcccggctaactttttgtatttttagtagagacggggtttcaccgtgttagccaggatgggctcgatctcctgacctcgtgatctacccgcctcggcctcccaaagtgctgggattacaggtatgagccactgtgcctggcctgagtaagaccctgtttcaaagaaaaaaaattttttccttttgctttctagttggagaccaactaaaccaagcctgtatttaagagcatatggttgaaagattaactctggaagcagatggacatcagtttgaatccctatttgcctcttcttaaccgcgtgactgggccgggcgtgctggctcacgcctgtaatcccagcactctgggaggctgaggcaggcagatcacaaggtcaggagatcgccaccatcctggctaacacggtgaaaccccgtctctactaaaaatataaaaaattagctgggcatggtggcaggtgcctgtagtcacagctactcgggaggctgaggcaggagaatggcgtgaacccaggaggcagaggttgcaatgagccgagatcgtgccactgcactccagcctgggcgacagagcgagactccttctcaaaaaaaaaacagaacaaaactgtgtggcttatgcaagtcactagaactctctgagcttgtttttccacctgtaaaatgaagataatactatttactttacagacttgtatgataagatgaagtataagaagcccagcatagtatttggcatgtagtacgtgctcagtaaacacgtaaataaaaataagtaggccagctatggtggctcatgccttttttaatcccagcacttcgggaggctgatgaaggaggattgcttgagcccaggagttcgagacctggttaacatagggaaacacaccatctttttttttttttgagacagagtctcgctgtgtcacccaggctggagtgcagtggcacgatctcaactgactgcaacctccacctcctgggttcaagcgattctcctgcctcagcctcccgagtagagtagctgggactacaggcatgtgccatcatacccggctaatttttgtatttttagtagagactgggtttcgccatgttggccaggctggtctcgaatgcctgacctcaagtgatctgcccacctcagcctcccaaagtgctgggattacaggcgtgagccaccatgcccggccgaccccatctcttaaaaaaagaaaaaaaaaaaaagaaaagaaaagaaaaaaggataggtaggtgtggtggcatgtgctggtagccctggctactcagcgggaggcagaggtgggaggatcacttgagcccaggaggccaaggctacagtcagctgtgatcataccattgcattcccacctgggtgactaagtgagatcctgcctcaaaataaagtaagtaactaagtaagtaaactttaatgtctttttactgagttaaaagcacaaagtacccaattcccttcgtcagggttttcatcacatagcccaaacatatcaccttggggtgtagtgtcttcctttatccctgaagaatatgagacctgttcatcatttgtcttcctattccacaggcaggcccaatgccgaaacacattgcattcataatggacgggaaccgtcgctatgccaagaagtgccaggtggagcggcaggaaggccactcacagggcttcaacaagctagctgaggtgggtgtgtatggcagagcccaaagtgaacagtctgtggagaggtagattatagctagaaaaccaggctctgagtttgctgtggttggagagtgttttttgtatctgtctctgtgttttattgtttgcttgctagctatagatctcatcttgacattggccagacgtggttgcttttgcctctaatcccacactttgggaggccaaggcaggaggattgcttgagcccaggggttcaggactagcccgggtaacatagtcagaccctgtctctacaaaaaaatttaaaaattagccagacttgatggtgcacacctgtgcccccagctactcaggaggctgaggtgggaggactatctgagcccaggaagcttgaggctgcagtgaatagagattgtgcccctgtactctagcctgggtgacagagtgacaccatctcaagaaaaaaaaaatgacattaacaaagaagtaatcatccagtgaatgaccataaaatactggaaataagaacaaaattgcctcttcttattttaataaatcaatagtttatattttatgcctcatccaatccttattgtatgctctacgtgacttaacattaataaaattgcatctgtagcttcagtaaccttattttcacttaacattttggttttgtttatttgtttgagacagtctcactctgttgcccaggccagagtacagtgcatgatctctgctcacggcaacctccgcctcccgggttcaagtgattttctgcctcagcctcctgagtagttgagattgaacacccgtcaccatgtccaactaatttttttgtatttttagtagagatggggtttcaccatgttggccaggctggtctcgaactcctgacctcaggtgatccacccccttcagcctcccaaagtgctgggattacaggcatgagccactgcacccggccaacatttggggaggcattttttaaggtgtatatataagctttctatctgtatctttcaatgactgtagaacattttatcaagaggatctgatataatttaactgctccactattacttgacattacaataaacattataaatagtactgtttcagcctgggcaacatggtgagatcctgtctctacaaaacaaaaaaaaaaattagccaagcatgatggtgcatgcctgtggtcccagctacttacgagactgaggtggaaggatgacttgaaccctggaggttgaggctgcagtgagctgtgttcacgtcaccgcaatccaacctggtgacagagcaagaccttgtctaaaaaaaaaaagtactctttttggataaattcttagaagtgacatttctggacgaacattgagtgactactcattctgctttgccaaggctgaggggtttctcaggacacaggtctttcagtgctaaaactggtgaaagtccccggcaaaccaggacatcactctacacagaggtcatgaacattttatggtataatgcatgttataaattggaagacattaagtttaacaaaagaatggaatatgacaatcttggtgaaatttttaagaagaatggagggccgggcgcggtggcttacgcctgtaatcccagcactttgggaggctgaggtgcgcggatcatgaggtcaggagatcaagaccatcgtggctaacacggtgaaaccccatctctattaaaaatacaaaaagttagccgggcgtggtggcgggcacctgtagtcccagctactcgggaggctgaggcaggagaatggcatgaacccaggaggcggagcttacagtgagccaagattgtgccactgcactccgcctgggcaacagagtgagactccgtctcaaaaaaaataaataaataaaagaatggaaatatggtctgtagttcacaggtcccagtgtcctagcacagggacacagtttgatgccagggccgtgatatttttttccttgagtgaatggcagtgaggttctcaccagaaccttgtagaagtctttacgtttgttgactccagcttctcttttgtaactgagaggcagttttgcctaatgcttaggagcttgagctctggagtcactcagaattcattggcacccctgctttgtcactgtctggctttgtgacctgcagcgagttatgtagcttccctttgcctcagtttcttcatctataaaatggggttagcaatctctatctcagtagattatttgaagataaataagatggcacaatgaaaagcatgtagcacaggccctgacctaaaggaagtactcaaaaaattgaaacttgttattagcaactgtattgactgatgtcagtggtgggttccaacccagatgtgccatccacagtggctgccttgcaaggtctttagggcctgaggctattcaagtgtcaggttctcactggcaattttcctaagatgacagtagatttgtttgcttgtatgtttgttaaggggttagagaggcagctcttcagcttgtttcttctgttctgtttgaatgtcttctgttgtctacgtttaacctcccgctctccatctctcaacattgtcctccacctctcaacattgttctccacctttagtggtacaggattagagcagccccaaaggactaagttttcttctttttttttttttttgagacggagtgttgctctgtcacccaggctggggtgcagtggcgcgatctcagttcactgcaacctccgcctcccaggttcaagcgattctcctgcctcagcctcctgagtaactgggattacaggcctgcgccaccacacccggctaatttttgcatttttagtagagacggggtttcaccacgttggtcaggctggtcttgaactcctgacctcgtgatccgcctgccttggcctcccaaagtgctgggattataggtgtgagccaccacgcccggcctgtttttttttgagttgaagtctcactctgtagtctaggctggagtgcagtggtgagatctccactcactggttcaagcgattctcctgcctcagcctcccaagtagctgggaatacaggtgtgcgccaccgcacccagctaagtttctgtatttttagtagaaatggggtttcaccatgttggccaggctgggcttgaactcccaacctcaggtaatctgcccaccttggcctcccaaagtgctagggttataggagagacccaccacacccagccagtttcatttctttttgagttataatttcatatggtgaactgcacagattttaggttttgacaattgcatttatttatctaacccatacccctgtcaagatataggacatttcctgccgggctcagtagctcatgcctgtaatcccagcacttcgggaggccaaggcaggcaatcacctgaggtcaggagttcgagaccagcctggtcagcatggcgaaaccccatctctactaaaaatacaaaaagttagccagatgtggtggcacatgcctgtaggcccagctactcgggaggctgaggcaggagaatcacttgaacgtaggaggtggaggttgtagtgagccaagattgcaccactgcactccagcctgggtgacagagcaagactccagcttaaaaaaaaaaaaaaaaaaagatgtaggacatttccatctctccaaaaaaattccctggtgccccttctcaatcaacttctgttctacctcctccttttcctctctaggcaactaccgttctgatttctgtaactataaatttgtttttcccattctagaactccatataatggaatcagacagttgaggatttttgacatattcttcaactctgagcctgttttatcatttgtaaagtaggcatgaaaacagtagtgtcattttaaagtggttgttcaaagaatcaaatgaaattatgtgaaaaccctttgcaggctattaaatgctacacagctgtccagttgttgctttttttcttttaactcagcctctcaacctaccagaataatgaagttatgctgtgagtaataacaccttgtgtttttatattgttcgttagccaccttgtaagggatggattgtgatcccatattacaggtaaggagacttcaacctagagaaattaaatgatttgattccagtcacataagtgcatgctggagtcagggactagagcctatgtctttacactctcagtgcagagttctttcttgtagtgcacaatgccatcagcattcactaagatcacatttttcagtttcttcaatggtggttttctgcttatttgatgcattaattctgacataaacactgatgttatcctagcttcacccagctttggggaggagaaaagtctgtctcctatctccaactctgagtcaggaccaaaaagtatctcttatttccccttcccactcttccttgtatcctagctccttgccttctcccctctcagactctgcggtggtgtttgaacctgggcatcctagaggtgacagtctacgcattcagcattgagaacttcaaacgctccaagagtgaggtagacgggcttatggatctggcccggcagaagttcagccgcttgatggaagaaaagtaagatgctatcagaggggagagcatgttcttccaccacccccagccttatcctaacccttgaaattctgttatctgaggcttacttaagggacttgcaactctttttaatgttagttagatatcttgggtggcaaatatcagaaatacaagatagtctttcattctttatttctaactttttaataaaaaagggggcatttatttgaggatattgaggggtgtcacatgatttaagaacaagtacagccagcctcaagcaaaactgaaaccaggaattaaacccactaggtagaacctctgtattcatttatttccacctctctctgcagaccagttttctcttgcttcaaaagagcagcctggaatcaataaaatcccttaattgggatccctaaattctatcagatttctaccccagagccaataaactatggccaaggaagtggagttaaagaaaacattgaggaagtcattttctgctgcacagtgaaccctaaaaagttactgtactccccctgcatagtcttttgggagggataggatgatgcataagagacatttatggggaagcatcagtaccattcttagctgtcagtaagtttaggcttaacttagggaataaagccagagaggggcaaagacaaatttcagtggagactgcttgcttcaaagtatggagcccttaccagccagaattgcccgaaagtcttagttacaactgttgtgtgcccagctcctacctgtaccaggaagatgagagaacagtgagcctagaactccagtgaagatgagcctagaacaatgggtggtagggagggtagccaggcttccttctgtctatattaggatggtgagactctgggctacagacattgctccccggtccccagcagagcctgtgtggctcagagtttacacctaaggagccggggatggaggcatggggggcatatcccactaatcttacctttttaaagtgtttactatatgccaggctttgagcctaaaatatattcttactcatcctgtaatcacattataccatgacaaagatattattagccaatttttagagagaaggaaagtagttaaccaaagaagttaaggcatatatcctgggtcacacagctatcagacaggcagagccaaggtgcacacctggatctttttgactccagagctgagctatcatctactacactgtgctctgagagacagaccatattacaattcctgcaagatcaaaacgcatggcagaagagatgctaatgagattgcgctgatcagttagtagtagagaaaatggtcttcgtttatcatgaagtcctggcaaaagcaagaagaaactcagaggtgcttttccattaatgtgccacagaaccccaaggtctgaggaggtgtagaaagaacctagtgggaatggggtagggggtgctgagttgcatttacctattttatgtgttgggcttctgtgtagaatttgatttgaagaaagggttctttggctaaaagaaggtgggaaaaccactggcctgattctgtttcatcagttgggaaactaaaccctagtaaagagaagaggttgagcaaggtggctcatgcctgtaatctcagcactttgggaagccaaggagggtacattgcttgagtccaggaatttgcttgattccagcctaggcaacatggcaaaaccccatctctacaaaaaaatacaaaaaaattaactggggatggtggcacatgcctataatcccagctatgtgggaggctgaagtggggggatcactgtgatgagcctggggagtctgaggctgcaatgagctgtgatcgatccactatgctccatcctgtgcaacagatcgagaccctgtctcagaaaaaataattaaaaataagtaaattaaaattttaaaaaacagaagacaagagcttacacatggtcacacatcaaactagtggcagaactataccacaagctagcaggaggagctgaatcaaggtcttctagtatactgccttcaattaatctcccattttccaaatgtgaagcattcggtttcttcatagcatttccagatgagagaagctggctgaattcattctcactgtatgcagagtttgggagttattgtatggaagcaatataatgtcataattaagaagacaagctctggaggctgactccctacgtgcaaatcctggttctccatcagctgtccaaacaaattacctaacgtccctgtgcctcagtttcctcatctgtaaaaggggaataataagggtatataactcagaggttggtgtaaggatggaatgtgttggtacatgtaaagcacttagaccaatatctggcatttagtaaacatagaatgttagctgtcaccattatcataatatttcactagaacataacaaaagtaccccataatacagctccttcccttgaggagtttactcacttctcaaatgggacaaacttcacagatacataaaatgcaactgcccaaaaaggacacatgaggtcgtgtaatgtatagtaaagagtttgggttcttgctggacatggtggctcacacctgtaatcctagcactttgggaggctcaggcaggaggatcacttgaggccaggagtttgagaccaccttgggcaacatagtgagacctcatctttacaaaaaatacaaaaattagccaggcatggtggtgcatgcctttagtcccagctacttgggaggctgaggcaggaggatcgcttgagcccaggatttggaagttaacactgaaccatgagtataccactgcactccagcctgggtgagagtaagaccctgtctccaaaaaaggggaaaaaaaaatgtagtttggggctgagcgcagtggctcatgcctgtaatctcagcacttgggaggccgagacaggcagatcacttgaggtcaagggttcgagaccagcctggccaacatggtgaaacctcatctctactaaaaatataaaaattagccaggcctggtggtgggcacctgtaatcccagctacttgggaggctgcggtgggaggatcgcttaaacccgggatgcggaggttgcagtgagctgagattgcgccactgcactccagcctgggtgacagagcaagcctccatctcaagaaaaagaatttgggttctcaaatcagacaaactgggtttcaatcctgacaaagcacttgatggctatatgaccctgggcagtccctatctgactgtcctgtctgagccttggcactgaagtaagtttctttcagagttgttgaagggatgcaatgaaataatgcatgtagaacagggtctgacacacaggaaagcactcaaaaaactggtggtcagttattacctgagcaccttgctctctccagctcagcaggggccctatcccaatgctgcctcttttccctgatcagggagaaactgcagaagcatggggtgtgtatccgggtcctgggcgatctgcacttgttgcccttggatctccaggagctgattgcacaagctgtacaggccacgaagaactacaacaagtaagttctcagatttccctatagggagctgtttcaatctttgattccctgctggctttagggagacgtcctgggctttccttggtctggattggtgcaaggggcaatgagagagtaggttgagcagcttagagactttctccgtctgcagggcacaccagacatgattctgcaataacatgttatatgtgtgtatactgacacatacacatagtttctctttcctcctttctctgcccagcccccaccaaataagtgtgtgtgtgtgtgtgtgtgggtgtgtttttacttgacagggaatgggatcggaatacagcagttcttatccctgactttgaagacagatccttcaagaaattcttgttctgttccactcctttaacctatggataggatgaccttgggaggtcatacagatgtacaggggaatagagttcaataatccaaactctgtgatgtgtagctttgaaatataacgtgtattttggcagtggacttgttttacatcaaatctccttcctattttcctttgtttgtgccaatatcacagtagagtcttcctctgaaagccggtgtacagtagaaggggagagggttaggacggcaataggagctatttggtggctgggcacagtggctcacgcctgtcatcctaggcaggtggatcacctgaagtcaggagttcaagactagcctggccaacatggtgaaaccccatctctactaaaaatacaaaaattagccaggtgtggtggtgtgcacctgtaatcccagctactcgggaggctgaggcagaagaatcgcttgaacccaggaggcagaggttgcagtgagtcgagatcacgccattgcacttcagcctgggcgacaagagcaaaactctgtctcaaaaaaaaaaggagccatttagtatttgtcttattataaaactagttacatgtttattccaagaaaacttggaaaccacaaaaaactcataatttcacctttcagaggtatccacaattaacatttgatgtgtatttgtttttctagggaaaggctggaagggcttctctgtaatcagtgacttcaatcatcagtccctgtccccctttggtaaattattctcttcttccctcctcaggtgtttcctgaatgtctgttttgcatacacatcccgtcatgagatcagcaatgctgtgagagagatggcctggggggtggagcaaggcctgttggatcccaggtatcccgagttgttttgcatggtaattgttaaggaaaacaggcctgggccagcatggcagctcacgcctgtaatcctagcacattaggaggccgaggtgggcagtccacttgaggcaggccaggagttcaagaccagcctggccaacatggcaaaactccctcttttcaacaacaacaacaaaaaagcaggcctgtaccaaaccataaagcccctctgtgccatgtacttggccagaggtctaattaggggagcatgtggaaagatttaaggggatctcccaaatttagagattaggattggcttattacaacctgcttcagaactagagttcaccacacaccaagaaaccccagagaaagagcaaagcagatgacaaagccatgttattattcctttacaaattataccctcctggccctttggtagtgtttttccaagaatgacttttcatgaatgcagtttgttggggctagagttctttaggtctctcatgttctagttccacacaagattcaggtgtttttcttttcttttttttttttttttttggtgaggcaaagtctcactctgttgcccaggctggagttgcaacctccacctcccaggttcaagcaattcttccgcctcagcctcccaagcagctgggactacaggtgcatgccaccatgcccagctaatttttgtattttcagtcgagacaggtttcaccatattggccaggctagtctcgaactcctgacgtcgtgatctgcctgcctcagcctcccaaagtgctgggattacaggcgtgagtcaccatgcccagccgattcagggatttttcaaaaagaaaattattaattattgtcaacatagtggaatcctaattattaaaggtggagagacttttgaagccatttaaatatttggtccctctcatgttattatttatgtaacttttaatatatttgtaaactaacagcaatagtaaaataatagtagcaaaaaataacccaggagatgtgttgtgttctgtatttcattaagtcattaaccttatgtgtgagagattcaaggctgttgtccattgtgtagatgagaaaactgagttcagcattgaagtgacttgcccagggtcactctactagtaagtgccagagctgggactcatatctaaagctgtttgattttagggttcttatcctttacctctattatgtgggatcttgggaagcaggaatttttctggttcccttcccgattcgattgacctaggaaactagattaaaaatcaaaaagttacttggtgagaatagaattagataaaaaggagaggagacagtttttgaggctattttatgaatgcctctccttcctaacagctgggtgacatttctctgtcacatagttcattcattcaacaaatattttatttttatttatttatttttattttttattttatttatttttttgagatggagtctcgctctgtctccaggctggagtgcaatggcgagatcttggctcactgcaacctccgcttcccaggttccagcaattcttccacctcagcttcccaagtagctgggattacaggcgcccaccaccgtgcccagctaattttttgtattttttagtagagacggggtttcaccatgttggcgaggctggtcttgaactcccaacctcaagtgatctgtctgcctcagcctcccaaagtgctgagattccaggcatgagccatcactcctggcccatttttatttttattttgagacagggactcactctatcgcccaggctggcgtgcagtggtgtgatctcggcccactgtagtctgtgcctcccgggcccaagcagtcctcccacttcagccttccaagtagctgggactacaggtgtgtgccaccatgctcagctaattctttttttggagacagagtctcactcttgcccaggctggaatgcaatggtacaatctcggctcactgcaacctccgcctcctgggctcaagcgattcttctgcctcagcctcctgagtagctgggattacaggggcatgccaccatgcccagctaatttttgtatttttagtagagacggggtttcactatgttggccaggctggtctcaaactccccacctcaggtaatccgcccacctcggcctcccaaagtgctgggattacaggcgtgagccaccgcgcccggcggttttagacttacgttacagtggatagtggtgcccttcaccatgctaggtaaccctgagagaaaatccagttgaaaagggtcagcagtttggttttggatatcctgtacatgttgaacagagatgtcaggtcaacagttcagcgagggattggtatagtcaggtcaacagtcagacagagatgtcaggtcaacagttcagacagggtttatctctgtcgccagtatggaagccatctgtgtataggttaacttgagcaaagaggggatgagaaagctaaggagagtctgtctgtctatctgtgtatttatctatttagagatggtctcacactgtctcctgggctggagtgcagtggggcaatcaaagctcactgaagcttggaactcctggtctcaaaggagcctctcaagtacccagtactacagacgtgcaccacctacccagctaactttttatatttattttttgtaaaaacagggtctgactttgttgcccaggatggtcttgaactcctggcctcaagtggtcttcttgccctggcctcccaaaatgctgagattacaggtgtgagccactcagccctgcctgttaaggagtgtagagtgagaagaagaaagagcctaagatggcatttttgaggaactctaccctttactggctgggtagaggagaataagctttataagcaaaaacacagaaaagcaggaagaaaaccagggcagccagcattacataagccaagaaaagagggagtttgttggtgcaagttgggaaggggtagggcacccatggaaacaatggtgtcaaatgctgtagagaggtcaattaagatgtagagtgaaaatcagctgttgttaaaacaattaagagactggtggagttagcagaggtagagagcaggcaggaagatgagacagaaaaggggtatagaaatagaagcatgttttcaataaaattcttagtttggaggtactttcgtagttcattatatttttgtgctttataatgaatatgtttcaaatattcttgtatgtatgaaataaatattaaggcacaagggttgacactagaatgaaagaaagccatttgacaagcagatctaatatgcattatgcctaggactctgatcttgactcctagtccagcatgctttaccctcataccacattacagtaaccactaccttatctcctgcttcttgtccagcaagtttttccatatccttctctgtcctgcatggtttagtaacttgcctctgtggggttagttatgcagacagggtgtgggttgggcagtatcaccagggtcaggaggccaatgtctcaacccaccaactcctgaagcttggtgtgctcagactgggctaatcagggcctgaggcgttacactttatattattcgaatttagacaaacctgcatttataacaaagtcagtgcgttaattacaattaggtcctatgcttctaatagctggaattttcctgatttctcactatcaccatccaactcctcatttttctttcttccagggtatgtatgtagatgtgtgtgtgtgtgtgtgtgtgtgtgtgtgtgtgtgtgtgtgtgtgtatttttgtttttttgtttttctgagatggagtcttgctctgttgcccagggtgaagtgcagtggcacgctctcaactcactgcaacctccaccttataggttcaagcagttttcgtgcttcagcctcctgagtagccaggattataggtgcacaccaccacacccggctatttttttttctttttttttttttttgagacagagtctcgctctgtcgcccaggctggagtgcagtggcacaatctcagctcactacaacctctgcctcccgggttcacgccattctcctgcctcagcctcctgagtaactgggactacaggcgcctgccaccccgcctggctaatttttttatatttttagtagagacgggtttcaccatgttagccaggatggtctcgatctcctgacctcgtgatctgcctgcctcggcctcccaaagtgctgggatcacacccggctattttttgtatatttagtagagatgggatttcaccatgttgaccaggctgatctcgaactcctgacctcaagtgatctgcccaccttggcctcccaaagtcctgggattataggtgtgagccatagcacctggcctgtttcgttttgtttttgagacagggtttcactctgttgctgaggctgaagtgcagtggtatgaacatggctcactgcagcctagacctcctgggctcaagagatccttccacctcagcttcctgagtatctgggaccacagatactgctaccacatctggctaattttttgactttgtagagacagggtcttgccatgttgtccaggctggtctcaaactcctgggctcaagtgatcctcctgccttggcctcccaaagtgctgggattacaggtttgaaccacggcacctgaccgaggtatatatgtatttttttagcagttaaattaatagattgttttgtgagtctggaaattatagaagaaggaagtagattgagaccaaaggatagttaataaattctattccaccgtgttaccttgaacgggctacttgattccctgtaggcctctgtctttcttataaaacaatagtgttaatagtaattgctaacacttactgagcatttactctgttccaagcattaagtattccacatacatttatccttagaccctataaggtagatactgtttttatgcccattttaaagatgagaatactgagacatggagaggaaaagtaacttgtgcaagttcacatagttggcaaacctgggggccaagatttcaacctggcttcagagcctgtgttctcattcactgtggcatattgacttcctcatagcaaagctgaaatgaacaataaggcagtaaaaaagaaaaaaattagatggacatggtgacttatgcctgtaatcccaggactttgggaggctgaggcaggaaaatcgcttgagccctggagtttgagaccagccctggcaacacggcaagaccctgtctctacaaaaataaaacagttagctgggtgtgctggcacacacctgtagctacttgggaggctgagtgaggaggattacttgagcctagcaggtcgaggctgcaatgagctatggttgcgccattgctctctagcctgaacaacagagtgaaaccctgtctgaaacacacacacacacacacacacacacacactcacttttgacataaatatttataacacatgaaatcacataatgaatagtttacactctgaatcatgcttttatcattcaatgttacgagtacttttcatgacccgtgtttttaataattcttcatatcattatttataatggctgtaaaatatatcttgtgttaatttctttaaccagtcttctatttgttgggtatataggcagtttaatatttcattattacaaataatgccacaattaaatctttgactgaacttgcctgcattttttattgtttcctcaggatctgagtttgaaagtgctcatttcaccttattcttgccaagattttttaaatgtaaactgttctgaccaggtgcagtggctcatacctgtaatccagcactttaggtggctgaggcaggttggatcgcttgagctcataagttcgagaccagcctgggcaaaatggtaaaatctcgtctctaaaagtacaaaaattacctgagtgtggtggcatgcacctatagtcacagctacttgggaggctgaggtggaaggatggcttgagcccaggaggctgaggctgcagtgagccaagatcacatcactgcactccagtctgggtaacagccagatcctgtctcaaaaaataaaacaaaaaaataaacctattctcataggtaaaaactgatattttaccgttatttaatgtaaatcatttccgaaaagtcttcacgtagacagctttaactcaccattccatttagtgatggatttttgttggccaaagtctacagatgttccattttgattttgtcagtttcatctttccaccctagagttaacccctttttttttgtttttgagatggagtcttgctctgtcacccaggctggagtgcagtggtgcaatctcggctcactacaagctccgcctcccgggttcacgccattctcctgcctcagcctcccgagtagctgggactacaggcgcccaccaccacgcccggctaattttttgtatttttagtagagacagggtttcatcgtgttagccaggatggtctcgacctcctgacctcatgatctgcccgcctcggcctcccaaagtgctgggattacaggcgtgagccaccgcgcctggccaacccctttgtttttttgagacacagtctgctgtatcactcaggctggaatgcactggcacaatatcagctttttccattaagaattctgcccactgcagaattcttactgcatacctactgcctaaagtaggtagaagaaactctttgcagataaattgtaaactcagagagactgagtctctgaagtcacactgcaagttggtgggactgaaaataattttttattattattctttatatagcactttatagttcccaaagtgcactcaaatctattatttcatttgatttgaccctcatgataacctataaggtggataggacaaatgggccctgtttttttttttcccttttaattacatttattttaatgctgaatttactcctgtgccataagtttttgtttcttcagtttctttgggatatcattttcttctgggcaacctcctcttctggtttaggaacaatctgttccttttcagtaaggatcatctcaatgtggcagggagagctcatggatgggttaatccaaccatgagctctgtaggtccagcggcacatcttaggtgctttgttcacttggatatgctcaatgaccagagaatctacatttaaacccttaagttcagcattactctctgcatttttaagcatgtgcagcaaaaattcagcactctttttgggccactgaccttgtgtccagccccactgcttggcctgggcacacctgccagctccaccattgtaacgtcggaatggtacgcactgtttctgtaaagtgacatctttcaggtacttcatggcttttcgtatatgcatacccttgatggcctgggcagtttcacgaatattcttaaagtaaacacgaagattggaacctcttgatttgcatgatatcatgaggttctccgggttaagtgaatagtgaaccattttcacagattacctcaggccgcttagggaaagagcaaatgggcccattttaaagataagagaatgagaaattatatggattgtacagagtctcacataacttggagaattaagaccatgctgccaagacaagattgtcagattaccagagaaatctgaaccagagcccttcttattgctcaattataagtgaatactgtttcctctgtgatgatgatacggaaaagaaagctctctctgtggtttgccttaaaggactgagagagatgagcaacttggctgggtgcagtggctcacacctgtaatcccagcactttgggaggccgaggcaggcagatcacttgagctcaggaattcaagaccagcctggccaacatggtaaaaccccgtctttactcaaagtacaaaaattagccgggtgtggtggtggctgcctgtagtcccagctacttgggaggctgaggcaagagaatcacttgaacccgagaggtggaggttgcgggagccaagattgcgccactgcactccagcctgggtgacagcgcaagactccatctccaaaaaaaagatgaataacttgcctaaagacacacaactagtaagtgtagagtctggttttgaacactcagcccagatctttctgctttcctgaccatgcgtccagaaacatgttcccaccaagaaatttttgtcttctggaccctttccaagatgtaactctaactacctggacattctgaattctgcttctgggtagttggtaggacaggtaaacagcattcttggagccaacagacaccagccatgcaaataccctctttctgtggacaggatagttttacttaagataaatgcttccactcaccagttttcttcaattctatctcctttctgaccatctctgtgcttgggaaagtagctcttatcaaacacaggagaactgatcatattgctgtttatttaaaatccggtgtaatgtggaatttttgcaatgtttcaggatccatatgacttaaataagattttaaaaataaattagctgagcatggtgttgcacacctgtggtcctagctacttgggaagctgaggtaggaggattgcttgagcatggaaggtggaggttgcagtgagctgagatcacaccactgcactccagtctgggcaacagagggagaccctgtctggaaaaaaaataaaatatgttttctgtttttttttgttttgagacagagcctcgctctgtcactcaggctggagttcagtggcataatctgggcttactgtaacctccacctcctgggttcaagcgattctcctgcttcagcctcccaagtagctgggactacaggcatgcggcaccacacccagctaatttttgtacttttggtagagatggggtttcaccttgttggccaggctggtctcaaactcctgatcgcaggtgatctgcctgcctcagcctcccaaagtactgggattacaggcatgagtcaccacgcctggccaaaaaaagttatttacataaattcaaacaataacagaagtacataaagtaaaaagaaatagtcttttcttccttacttcttatccaatccactgttaatagtatgatgtatctttttagactttgttctttatgtatacttatatgcacgtgtgaatgtttgaatgtgtgtgtatgttttatactatatattctctgaaacttgccttttacatttaacattagattttggacatctttccaaatcagtgcatttagatttatctttatttttagaatgcagttgcatagtatttcatcaaatactgggccataggatgtatgtatgtattttaaaaaacaagatgtttttagcaaaagacaacagatatttttgtgggtgcatctggttttaggcctgaggctaaatgactttcagcaaattattcatctttgagcctcagtttccttatctataaaatgaggatagaaataccttatgtatctgctgagcatggtggctcatgcctgtaatcccagcactttcagaggccgaggggggggcggatcacgaggtcaggagatcgagtccatcctggctaacatggtgaaaccctgtctctactaaaaatacaaaaaaaaaaaaaaacaaattagcagggtgtggtggcgggcacctgtagtcccagctactcgggaggctgaggcagaatggcatgaacctgggaggcagagtttgcagtgagccgagatcgtgccactgcactccagcctggggaacagtgtgagactctatctcaaataaataaataaataaataaataccttatgtatcagaacatgtcaaaaaaggcaaaaaataaaaaagagaaaagaattttacattgtattctctaaaaaaaaaaaaaaaaaagaaataccttatgtagttgtgaagatttaaattcattcattaatttagcaaacattttttgagggccttctgtgtagtattggctagtgtatttgatggtattgtataaactgagaagcctatatatggaagttcaccatgagaacactacagaaagagaatactacaggatgtgtgcctctctttgtctcttcttgctcatcttagtgatatctctgagtctctgcttgataagtgcctctataccaaccgctctcctcatcctgacatcttgatacggacttctggagaagtgcggctgagtgacttcttgctatggcaggtaggtcatttccaagtactattatgtttgtgtcatggggaaaccaactgtatccacagaatggatcagagtggtccatccccactcccaaacaggctggggccagagtacttctggggaaagctaaaatctggagaagcatctctaggctgtgtctcataatatttgatgtccattcctcatctgtcgctggctttgcgaatccaactatagtgaaaacttcattgtgccgcttttcaaggaatgggacttctgtcttgcatccctgagcgtaagctcttgccttggtaacctgccagggaccctagcccctctgggttggaagcttgccttgcagttactagtccctccccttcaggataaagggccatacctatgcaagcatggtaaacaatatgcaaacactcaagtctctatcccctgttaacttggtccctggagagcacataactaggggaagtccttgttctgggagagactccatttggaagcagctcacatgataaagctccagaaattttaatggaccacaatcttaaaagtgagctaacgcagggcgtggtggctcacgcctgtaatcctagcactttgggaggctgaggcaggcagatcacttgaggtcaggagtttgagaccagtccagccaacatggtgaacccctgtctctactaaaaatacagaaattagcctggcatggtggcaggtgcctgtagtcccagctacttaggtgaatgaggtgggagaatcacttgaacctaggaggcagaggttgcagtgaggcgagatcgtgccactgcactccagcctgggcaacagagtgagactctgtcgcaaaaaaaaaaaaaaaaaaagaaaagaaataagtacaatgtgcacctattggttctgtggcccactgtgctgctcagatcacgtttgggaagtttactgatgggctgaattttaagagactacagagtcagttactcagtgtacagaattagttacattgacaaacttgaggacttactggaagaggccaaactggaaagcaaggaatctcatgtcttacaaaaaatgaggaaaggatagtggtctgcaaaagggaaataagtgacaatgtattcccttggaaaaaagtgttgagttccttctttatgctggaaatatggcagtgagtgagtcagaaatgatccctactgtcttgaaacttatagtttgctagcaaagacaaactctgaacaagtcattacaactttgggaactgataacaggcagctctaatctagccttgaaatacttgaaagaatgtcactttgaagaagaaacaaacttgttccagaaaaaatacctgggaccttagtagaagttgtagggaaggtgacattggtttagcataaaaagccaaacaggctatcggacaactagttatcccccatgaggtactgaattcctcaccactagagatatcaggcagtggctgtcaagagtgttccaaaggggattcttcatcagtgattattattaaagtacacctggctctttgctatgcatatgttatctcatttaatctaaacagtaccctgaaaattaggtattcctattatccagttttacatttgaggaatctcaggccaggtgaaattacccctgctcaaataaatggtaaatggttggagccaaaattcaaagccaggcagtctggctccagagctcatgctctcaaccactgtgccctgctgctggtacttaaaaataacaatggcagctaccatttgttcattggtgacctttatcagacagtatgtcttccagatgccctctaagggccaagagccaataacataatccagatgttatttcatagtcctaaaattggctcttagaaaaatcctggtggaaatgttgatctagtctcgttttagttctgctttaccacaggcaggtgatctggctgcctcaagtgacgcctccccctactagtgaatgaatcagggccagcagcagctgcagctacagctcaggatgcctgtaacattgtcatctctgggcttctgggtcctgcttagcctgctttttccctggaggactgaccagggatgcggcccagcaacatgttactaaatcatactctcctccctacctttcccagacctctcactcctgcctggtgttccaacccgttctgtggccagagtatacattttggaacctcttcgaggccatcctgcagttccagatgaaccatagcgtgcttcaggtaagaaagagttcagggctggccagatgggatgggatggaagaaaagattagcattgattgacaaccaccttactatataccaggcacttcctaataagatgatgataatgatgatagtagctaccacctactgagtatctactacttgtcaggcactgcgaacattttacatgctgcaactcatttaatgttcccaagaacccaatgagggaagtcttattagcccctcccttatgtaagtaagcaaacagaaatgatttagttaaggacacataatcagtaagaggtaggaataggatttgagctacaggtcttttatcttttaaagactcaggaggaaaaggcttctcagagaaactggccattattcctttaaagtattaccctaataaaagatcgtagcagtagggattaagaactaaatagcattgtctttccattgtgtaaacctatgttgtgtcaagacttgaagtttgactttcagttttcatcaccaaatcttgaaacaggttttattagcagtcacctgtatatgattaggtctctttataataatggtagtggtagctaacatatgaggatctacgagggcacttaggtgatttcatgtaagttttcttatttaacctaacaacccagcagttttggtgtcctcatttttcatatatggaaccagaggggcagagagacttaagtaactgtcccaaggaacctgaattttatctttatttatttatttattttgagatggggttttgctcttgttgcccaggccggagtgcagtggtgcgatctgggctcactgcaacctccccctcctgggtttgaacgattctcctgtctcagcctcccaactagctgggattacaggcacacgccaccatgcctggctaatttttgtattttcagtagagacagtgtttcaccatgttggccaggctggtcttgaactcctgacctcaggtgatccgcccaccttggcctcccaaagtgctgggattacaggcgtgaagagcctgaattttaaaatcaaagctggtgctgcttcttcagtctggagagataatgccaggaggaaataatgatgtgagtcagggattcttaatctccttggtattggggtccctttgaataatctaatgaaagccacagaccatctccctagaaaaatcgcagatcactcaaatgtggaattttgcatagaattgtaaacttatcatggaaacacatagaatactttttttttttttttttttgagacggagtttcgctcttgcggcccaggctggagtgcaatggcgcaatctcggctcaccgaaacctccgcctcccgggttcaagtgattctcctgcctcaccctcccgagtagctgggattacaggcatgcgccaccaatcccaactaattttgtatttttaatagagatggggtttctccatgttggtcaggctggtcttgaactctttacctcaggtgatccgcccgccttggcttcccaaagtgatgggattacaggcatgagccaccaagcccggccacacatagaatactttaagggggttcacataactgctgaaatctgcccctgaatcccaagtccataactcctgctataagtaaatcaaatcacaaagacttgatcatgtatttaattacttagtctcagaatatgaggaaattaaaagaagtttagaattagtgaaaagaaaaacagcaaaggcacaattatccactgtcagtggggaatgaatatcagatttttccatatgaccaaagctccctctaaaaactaaaactttacccttttttgatggaaaaatttctaaaatgtatcttgtacataattcattgaaatctatataccaggcacttgctaataatgatgatgattaggataatcacgtgctattttttgtttttttttttttttagcagggtctcactctgttgcccaggctggagtgcagttgtgcaactttggcttacttcagcctcccaagtagctaggactatgggcacacaccaccatgcctggctgatttttgttattttttgtagagataagtcctcactatgttgcccaggctggtcttgaactcttaagctcaagtgatcctcctgcttcggcctccccaggtgctaggattatagacatgagccaccatgcctggccgtcatattctaatgattatgataatagtaattatcatctttaaacacttcattgtacaacaatatccttgaggggtagggctgtttgctctaagttagatggtcccagaatacctgggtttgaggtttcatgtatatttttctgtgtcctccctctttcatttcctactgctgtcaacagttaattttgacagtatctctcctcttccatagtatttactgttttaaatcagctatagacaaggaaaccagatagtcaagcttgttggaattatgtatataaaatgagagtgaactggctctgcatgaagcccaaaggagcttggtgcatgagtttttgtgtttttacctctaattgggctgctcagaagtcttttatagtaatttcacgtttctcagatactttgcatatggttgtcagaggagttaactcaagtttcattcattccataagtatttattgagtagtatgaatcaggcactgtattaggcacaggagagtcaacaggtagccagagggacaagatctctacctttgtggaacttgtattcttgaggagacagaaataaacaagtaaacaaatatataagttccgattgtaataaggcagtgaagaatacagagtgatgtgctagaaagtaatgaagagaatgcaaagagactgaggttaaagtttgggtcttggaagaacaaaaaagaggtcaatgtgccaagggagaagggcaggaaatgaggctagagtcagaccttggctcatatagagccttgtaggtcatggtaacaaagctgaaggactttaatcaggggatgacgggatctgagttgcattttgtaaaaatcattcagaattttcaacgggctggagttaaagccaagagacagaactcctgcagtagtccaggtgagagaggatgcgcctcgaggtagggtggtggcagtagggaaggggaggagtgaagacgggataaaaacaaatgttgaaatagaaacaagtgaaactagctatatcaaggtgataatataactccccagagaaaggaattaattcagcttacctgaacacagttctctgctattcatctttagtggaatttcttttcaggataatacaaactgcaacacaaaattaaacattacttaagaggtttattgttagtggcaatgttggtaatgtaattatgaaactcttgtttctttttttttgaaatggagtttcgctcttgttgcccaggctggagtgcaatggcgtgatctcggctcactgcaacctccgcctcccaggttcaagcgattctcctgcctcagcctcccaagtggctgggattacaggcatgtgccaccacatctggctaattttatatttttagtagagatggggtttctccatgttggtcaggctggtctcaaacccccgacctcaggtgatctgcccgcctcggcctcccaaagtgctgggattacaggcgtgaaccaccgcgaccggcctgaaactcttgtttcttgtaggctaaaacaaataagtacaaataataatgttattaggaaccaagacacttaggttgtggccatagcaattggttgtatagttctgctgtttcctgggatggggtggaaggtgtttgaggtcaactattaagtgttccatttttacctatggatcatatttgcaaacttttttttttttttttttttttttgagacggaatctcactctgtcgctggagaacagtggcatgatctcggctcactgcaacctctgcctcccggattcaagcaattctcctgcctcagcctcccatgtagctgggactacaggcacgtgccaccacgcacaactaatttttgtatttttagtagagacagggtttcaccatgttggccaggctggtctcaaaatcctgacctcaggtgatccacccaccttggcctccgaaagtgctaggattacaggcatgagccgctgcgcccggcctatatttgcaaacttttattgagttcttaccacatgtcaggcatccttccagtattgagttcttaccacatgtcaggcatcctttcagtaaattctgtgaactgctttaaggcagatactattattattgcctctgtttttagagcaaggaatccaaagttataatagagatactgattatcttgaagccttctccagcaggagcccttggaggtcctggccaggctttctctaccccagaagcttcaaagctctgtttctagaaatcatatcaccttggcagatgcactaaggggagaatccagactaacagcatcctcaccagtttgttctcagaccagagaggtctttccaggcttttctcatgtctcccttttacagaccctgtatcatggccaaactggactcttcccagttacctgttccatgccctccagtttcctacctgtatgtctgtgctcttgccccatcacccaaattcccattttaaaatctgagctgctctgtctctaggccctgcccaatgtgtccctattctctgcaggaagccagggcaaggggctaggctctggacctagagtagcttactgagaggaaggcagcgggtggatcgtaagggaagcagggacttggctacaagttgtggggagccagaccttggtatctgaatggaccatgacagtctccaggtggtcacctagccagtcttaaaggctggcaaagggagatcttgactatgatgcagtaggacttgtcagcaaagaggcagggacaaatagagaatcaggccagggagggggtgtgcggcagtgcagagcagctgatcctcaatcacaagttgcatggatggtaggtccttgagaggtcactgatggagatgagtaaaaagtgttcacctcatctccaaggatgatattagagagggaaaagacacatgttcccacgaagcttcctgtagtacatttgtcacaatttaaacgggctggattgaacattatatttcttctgctcttcaggttgtcactatcttctcctcaggataaaagcttgagttatgtatgtatgcatatatgtatgcatgtggaaatggggtctcgccatgttgcccaggctggtcttgagcagctgggctcaagcgagcctcccaccttagcctaaaagcttgagttaatgtctcagacattcatgactttgaatattggcactgcctacatagctatatgactgtacagttacttaacccctcagagtatcattttcctcacctgtaaaatgagagaagtagcgtttacagtaatacctaccttgcaggtttgtgatagggattcagtaagctaacacatgtcaagtgctgagtgcagtggctggaacagagttcattttccaagaatggtggccaatattgttccccacatgtgtgtctcttggcctctcctcagactcctctctggaaaagcaccctgcacatcctgtccccagtacaactccccaggcaaggagactctgagggtgcttcagaacatcatgtttctggtaggaggtgcccttctctgcctgagagcagccctcagaaatgcattcctcatgctgctgacctgggctggctggttgcagcttggggaaggacttttcattggctaatgttttgaagccaaggacctgcagcctctctccaggtgccaacagagtggtagaggacttttagatttaagtactggagggactattacatcttgttctctgattctaccaaggagagaataagagcagagagggataatgcccaggaggaatttagattcataggttagaaccacatttctcaaagtgagcttcttggagcccttgcaccaagattggataaggtctgtacaaaaagtctctaaggaaagaattaacgccctcacttaccctgattggtcattatacaaggatagtagacaaatggtcagggagagaaaagttgacctctaggacttctgttagcttggatttcccaagggtaagtacttgagaagaactggaaacacctctgagattgaaagggtagattcagaccatgtggaagctggatagacaggtatccagatacaggccaccagcttttccacccctagaaagtagagcttatacacaggcacgagatacacttcacattgtcctctcaagaagttatcttagtggagaagccaagggaacttcagccatctcagcctcgctgtcattttctgtaaaatgacgagcagacaccctcccaactctgctatctgaacaatgaactgctaattcctggcagacaggggccaggctctgcctgggctacagcccccattgctggcatgcactctgatgccatctggaagaagcttgcgcctcatgaagtggctttagctagctccatatttcctccctctgttgctgagcgtcccccatcctttctgttctgccagaaacttagactacttagcccagtccacaagtggcggtgatagaacagctaacagttaatagccaagcagtaggctgaaaattcattatctcatttttcctcaaacaacccagtgaggtgggtactcttatcccggttttgcagagtaagagagagccttagagaggtgagggaggccttaggaacttctcaaaccccagtgctccaggtggacttactctggccttaacaggctcttcggttccatgcatctttgctcattactcccactgccagaatattctccctgccccccacacacctcacctctgtttgaatcctcctcattggttaaagggccagctcaaattctgtctgtccatgaaggtcactgctccgtgatgttcatcagccacacttgctttctcctctgaactgcatgacccttaccacatcctattttgcatcgtggcactctgtgtgcatggctgtacaatcagcctgtaagcacctggattgctgggatcgtgtcctgcgcatctccatatcctcaaaaaaaatcctgtatgtagcacccagggagcctcctgaccaaggcctggaagaagcccttccagcaagacggagagctctacggcaactgttcaagcccgaagtcctcatagctccacatgtaattcattgtaatagcagaagagaagtattcttgaatgcctgggattattcaggagccgggggggacagtccagaattctcatttgtcatccttattcatgcagtaaacctttattgctgagagacagcaaatcagttccctgctccatgtctgtctccagcagaaagtacctccctcacagctccattgtgagggtcaagtgaggcaacagatgaagtggttgtgcacatgtaagatattctttaaaccatgaagacagagcagtcaaggtgcttacaggctgattaggacaaaaacatgtatacaagtttatcgtaatacaaggtagaatgtgggaagggtcatcagggtataggataccataggaaaatagagtttctcacacatggaataggtttggcaggaggagctctagtgcaaaggctttgcaggtcagttagactggcaggaacagagaggatcagtgaggcacaggaaagccttggttctgctccaaagggattttccgctcttctgtatcaggagcatcctcactgctctcctgggatcacgtggtcagtcagttgagtgtttcacatgtacagggcaccccaagtgctggagaggaagaagcccagtctctgccctctagtacttgggatgataactgctgccagggagtatgatcaccacctggtgtcagagctggttgcaagaggcttgaaggctctcaaacttccaagggcttattttctaacagaaagagtggattgtgaacactaacacttattctactatgcagaatgcaataagtggcttaagagagttgaacctgcttctcagaatgttcataggggggtcatttgctggaaggatcaggctggtcttcatacaggaggcaagtctggagctctgaaaaatagcctagggagtggggaggatggtaccctcagaggaaaacctggggagatcaaaggaagtgacccaagggacatgtccccgacaagaataggacctttcttgcagcggagaatagacaataacaacttgtaaaattgctgtttctgtctaagagcctgctaatatcctagagaggattttgcatatgttatctctaatccttaaaaccactcttcaaggtaggcacaacccccactttacagatgaagaaatgaggttaggacaggatttgcccaaagacacaaagccagttgatgggggaatcagaagtcagacccacatttgtttggttccaagagcatgagaaaaactttaagaagtacagacgcttccacacaaaacaaaccaagatggacccagaattgccactgccctgcctgtacaacatgagcaccacccactgcatacctactcccaagccttttcaaatctggtacctactttccactgttccacttcacttggcccaccctgtgccccaccccctacctcctccatcccagtttcacccactcctaaaaatgatctccccaccccaatccccacttttctctagcagaaggcccgagacatgtatgcagaggagcggaagaggcagcagctggagagggaccaggctacagtgacagagcagctgctgcgagaggggctccaagccagtggggacgcccagctccgaaggacacgcttgcacaaactctcggccagacgggaagagcgagtccaaggcttcctgcaggccttggaactcaagcgagctgactggctggcccgtctgggcactgcatcagcctgaatgaggctggccacctgccactttgccctgccctctgcctccagggctccactccccttccttttcttggtgaaaggcacctcctttcctgataatgaatggtgttccctttgcttggctggggagccccccaggccaggtttgctggccatagatacctttgggctgcctgggacaggctcctgaggaggattgagggtgaaagtctcccacgagtacactaaacctaggtctggtcacca

SEQ ID NO: 15550 - DNA, 36887 bp, Homo sapiens
ctgaagccgtggggacgcgcccagcggagctaatcaggtgccactgaactgaaggggtgaactagaggagaagagggtgactgggcggggagcagctgcgggagaagcaaagggacgactgagggaataatcaggagaccactgaggcgtgaagtactaggcgtgcgataactgaaggagttagtaactgggagcacagagttggaaacagcttaggggaagatggagaaggaagaaacggggaatgatcaagatgtgggcaccatgatgtggcaggaaaccgacttagatgttcagaagaagtcagtgcagatacggaggaaatgggaatgggaagaagtctgcaaagccaggagaaccgaggaaaggcttttgcctccagaggtcacattgcgttataaaactctgggtggtaaaagattataggcttagaccagtgtctttggattctaatgctggctgctctccatagtccatctgattccccagaagtcagttatagctcttcgcaaaccttggtgacttcttattttctttcttgtttatccaagattacctggctggtgtttgcttgttctggagtgatcttctgactggaaaagaactatgtcatggatcaaggaaggagagctgtcactttgggagcggttctgtgccaacatcataaaggtgagcaatggcccagagcaccggttggccttctggtcagttggataatcttatataaaaacctgttattaaagttgatgatgttaagtgcaattcatgatgttaagtggaatttagcaaggaaaccaaagagtcttagaatggtaacttccaggtctacatttctggtagacttttgtcctaactctgatattttctggaagcccaggcctcttaatgtcactgggcagcctagactgctaagtattctttatagagaactgaaatttgtttccctggaacattgatccattgttccatgtactgtcttcttgatttaaataggttaatctttgatatattctttgatctgtcagtagagctgggcccggtcactcacgcctgtaatcccagcaatttgggaggctgaggtgggcagattgtttgagctcaggagttgagaccagcctgggcaacatggcaaaaccccgattctccaaaaaattaaaaaaatagcagggcttggtggtgtgcacctgtagtcccagctactcggaaggctgaagtgggagaatttcttgagcccaggtcaaagctgcagtgagtcatgattgtgccaccacactccagcctgggtgacagaacgggactgtctcaaaaaaaagagttcagaacaagactctgtctcaaaaaaaaaaaaaaaaaaagagtttgggctctagacgcagacaaacatgggtgaaattcctgttcttttttttattttgagatggagtctcgctctgtcgcccaggctggagtgcaatggcgcaatcttggcttactgcaaccttcatctgccaagttcaagcaattctcttgccttagcctcccaagtagctggggttacaggcatatgctaccacacatggctaatttttatatttttagtagagatgggattctcatattggccaggctggtctcgaactcctgacctcaggtgatccacctatctcagcctcccaaagtgctgggattataggactgagccactgcacctggcctgaaagtccagttctatcatttagtaatcatgtgactttaacaactgtagaattatcatgagaatttatgagacattaatataaagcagttagcataatgtctagcagttcttaattattattaggattgtctttcagacatttgaagactattatctcctatcttccccaaatcttccctcagctttttctctaggaatcacagcaatattatatctgcctaagacaggtttgagattggggccagtcagcttggttttgtttttcaaccacaggctgtcaagcagcaggtagtaatgaatttatgagtcagtaacctttatacaagccccacacatgctcacaaacaaatgccaagtgatctcaagcagtccaggaaatgggaagtatctccttggggaaccactgcagtggtatgtttggaagaacaagctgcataacttgaatggattttgggggctggaaaggctgtatgtgagacagaagtagaaaaaggagaagtgttgatgaggaagcagtcagggaagagccctcccaggtgaggaaaaataggctaaggagtccatttgtgttatgggagacaactcaaagctgctccaagccaaataagggttttgttttttgtggtttcttttttgagatgcagtcttactctgttgcccaggctagagtgcagtggtgcagtcttggcttactgcaacctctgtctcctgggttcaagcgattctcccacctcagcctccccaagtagctgggattataggcaccggccaccatgcctggctaattttttttttttttttttttagtagagttggggtttcaccatgttggccaggctggtctcgaactcctggcctcaagtgatctgcccacctcagcctcctaaagtactgggattacaggcttgagccaccacgtccggccccaagtaagttttgtttggctcaaaaaaagtcttttttgtttgctttgaaaaacaatttttttttttcagacagagtctcactctgtcgcccaggctggagtgcagtggcacaatctcagctcactgtaccctctgcctccccggttcaaacaattctcctgcctcagcctcccgagtagctgggattacaggcgctcgccaccacgcccggctaatttttctttatttttagtagagacagggtttcaccattttggccaggctggtcttaaactcctgacctcgtgatccacccgcctcggcctcccaaagtgctgggattacaggcatgagccactgcgcccggctgaaaagcaaaattttaataaaaatcctgatgtttggttttcttgcaagatcaccagatccagcaatgttgtgccccagttcctgtgtgtcagcagttggctagaggtcaggaattagtgcctttttttttttttttttttttttttgagacagagtcttactctgtcacccaggctggagtgcagtggtgctatctcggctcactgcaacctctgcctcccgggttcaagccattctcctgcttcagcctcctaagtagctgggattacaggctcccaccaccacacctggctaatttttgtttttgtttttttcttttttccgagatggagtcttgctctgtcgcccaggctgcagtgtggtggcgtgatcttggctcactgcaacctctgcctcccgggttcaagcagttctcctgcctcagcctcccaagtagctggtgttacaggcatctgccaccacacctggctaatttttgtatttttagtagagacggggtttcaccatactggccagcctggtcttgaattcctgacctcgtgatctgcccgccttcgcctcccaaagtgctgagattacaggcatgagccactgtgcccagccctaattttcacatttttagtagagatggggtttcaacatgttggccaggctggtcttgaactcctgacctcaagtgatccacccaccttggcctcccaaagtgctgggattacagacgtgagccactgcacctggccctatgagttccttttttctgtggaaggtaccatcttcatttgactatgcccatcaaaatttttcctggccagacacgatggttcaaacctgtaatcccagcactttgggaggccaaatcgagtagatctcttgatcccaggagttcgagagcagcctggccaacatggtgagacccccgtctctacaaaatataaaaaaattagctgggtgtggtggtgtattcctgtagtcccagctacttggggaattgaagtgggaggacctttctcctcccgaaaggtggaggttgcaaatgacctgagataacaccaccacactccatccaccttgggtaatagagtaagactctgttttgtttgtttgtttgtttgtttgtttgtttgtttgttttgagacagagtcccgctctgtcatccaggctggagtgcagtggcgccatctcggcttactgcaagctccgcctcccgggttcatgccattctgctgcctcagcctgccaaatagctgggactacaggcgcccaccaccacgcccggctaactttttgtatttttagtagagacggggtttcaccgtgttagccaggatgggctcgatctcctgacctcgtgatctacccgcctcggcctcccaaagtgctgggattacaggtatgagccactgtgcctggcctgagtaagaccctgtttcaaagaaaaaaaattttttccttttgctttctagttggagaccaactaaaccaagcctgtatttaagagcatatggttgaaagattaactctggaagcagatggacatcagtttgaatccctatttgcctcttcttaaccgcgtgactgggccgggcgtgctggctcacgcctgtaatcccagcactctgggaggctgaggcaggcagatcacaaggtcaggagatcgccaccatcctggctaacacggtgaaaccccgtctctactaaaaatataaaaaattagctgggcatggtggcaggtgcctgtagtcacagctactcgggaggctgaggcaggagaatggcgtgaacccaggaggcagaggttgcaatgagccgagatcgtgccactgcactccagcctgggcgacagagcgagactccttctcaaaaaaaaaacagaacaaaactgtgtggcttatgcaagtcactagaactctctgagcttgtttttccacctgtaaaatgaagataatactatttactttacagacttgtatgataagatgaagtataagaagcccagcatagtatttggcatgtagtacgtgctcagtaaacacgtaaataaaaataagtaggccagctatggtggctcatgccttttttaatcccagcacttcgggaggctgatgaaggaggattgcttgagcccaggagttcgagacctggttaacatagggaaacacaccatctttttttttttttgagacagagtctcgctgtgtcacccaggctggagtgcagtggcacgatctcaactgactgcaacctccacctcctgggttcaagcgattctcctgcctcagcctcccgagtagagtagctgggactacaggcatgtgccatcatacccggctaatttttgtatttttagtagagactgggtttcgccatgttggccaggctggtctcgaatgcctgacctcaagtgatctgcccacctcagcctcccaaagtgctgggattacaggcgtgagccaccatgcccggccgaccccatctcttaaaaaaagaaaaaaaaaaaaagaaaagaaaagaaaaaaggataggtaggtgtggtggcatgtgctggtagccctggctactcagcgggaggcagaggtgggaggatcacttgagcccaggaggccaaggctacagtcagctgtgatcataccattgcattcccacctgggtgactaagtgagatcctgcctcaaaataaagtaagtaactaagtaagtaaactttaatgtctttttactgagttaaaagcacaaagtacccaattcccttcgtcagggttttcatcacatagcccaaacatatcaccttggggtgtagtgtcttcctttatccctgaagaatatgagacctgttcatcatttgtcttcctattccacaggcaggcccaatgccgaaacacattgcattcataatggacgggaaccgtcgctatgccaagaagtgccaggtggagcggcaggaaggccactcacagggcttcaacaagctagctgaggtgggtgtgtatggcagagcccaaagtgaacagtctgtggagaggtagattatagctagaaaaccaggctctgagtttgctgtggttggagagtgttttttgtatctgtctctgtgttttattgtttgcttgctagctatagatctcatcttgacattggccagacgtggttgcttttgcctctaatcccacactttgggaggccaaggcaggaggattgcttgagcccaggggttcaggactagcccgggtaacatagtcagaccctgtctctacaaaaaaatttaaaaattagccagacttgatggtgcacacctgtgcccccagctactcaggaggctgaggtgggaggactatctgagcccaggaagcttgaggctgcagtgaatagagattgtgcccctgtactctagcctgggtgacagagtgacaccatctcaagaaaaaaaaaatgacattaacaaagaagtaatcatccagtgaatgaccataaaatactggaaataagaacaaaattgcctcttcttattttaataaatcaatagtttatattttatgcctcatccaatccttattgtatgctctacgtgacttaacattaataaaattgcatctgtagcttcagtaaccttattttcacttaacattttggttttgtttatttgtttgagacagtctcactctgttgcccaggccagagtacagtgcatgatctctgctcacggcaacctccgcctcccgggttcaagtgattttctgcctcagcctcctgagtagttgagattgaacacccgtcaccatgtccaactaatttttttgtatttttagtagagatggggtttcaccatgttggccaggctggtctcgaactcctgacctcaggtgatccacccccttcagcctcccaaagtgctgggattacaggcatgagccactgcacccggccaacatttggggaggcattttttaaggtgtatatataagctttctatctgtatctttcaatgactgtagaacattttatcaagaggatctgatataatttaactgctccactattacttgacattacaataaacattataaatagtactgtttcagcctgggcaacatggtgagatcctgtctctacaaaacaaaaaaaaaaattagccaagcatgatggtgcatgcctgtggtcccagctacttacgagactgaggtggaaggatgacttgaaccctggaggttgaggctgcagtgagctgtgttcacgtcaccgcaatccaacctggtgacagagcaagaccttgtctaaaaaaaaaaagtactctttttggataaattcttagaagtgacatttctggacgaacattgagtgactactcattctgctttgccaaggctgaggggtttctcaggacacaggtctttcagtgctaaaactggtgaaagtccccggcaaaccaggacatcactctacacagaggtcatgaacattttatggtataatgcatgttataaattggaagacattaagtttaacaaaagaatggaatatgacaatcttggtgaaatttttaagaagaatggagggccgggcgcggtggcttacgcctgtaatcccagcactttgggaggctgaggtgcgcggatcatgaggtcaggagatcaagaccatcgtggctaacacggtgaaaccccatctctattaaaaatacaaaaagttagccgggcgtggtggcgggcacctgtagtcccagctactcgggaggctgaggcaggagaatggcatgaacccaggaggcggagcttacagtgagccaagattgtgccactgcactccgcctgggcaacagagtgagactccgtctcaaaaaaaataaataaataaaagaatggaaatatggtctgtagttcacaggtcccagtgtcctagcacagggacacagtttgatgccagggccgtgatatttttttccttgagtgaatggcagtgaggttctcaccagaaccttgtagaagtctttacgtttgttgactccagcttctcttttgtaactgagaggcagttttgcctaatgcttaggagcttgagctctggagtcactcagaattcattggcacccctgctttgtcactgtctggctttgtgacctgcagcgagttatgtagcttccctttgcctcagtttcttcatctataaaatggggttagcaatctctatctcagtagattatttgaagataaataagatggcacaatgaaaagcatgtagcacaggccctgacctaaaggaagtactcaaaaaattgaaacttgttattagcaactgtattgactgatgtcagtggtgggttccaacccagatgtgccatccacagtggctgccttgcaaggtctttagggcctgaggctattcaagtgtcaggttctcactggcaattttcctaagatgacagtagatttgtttgcttgtatgtttgttaaggggttagagaggcagctcttcagcttgtttcttctgttctgtttgaatgtcttctgttgtctacgtttaacctcccgctctccatctctcaacattgtcctccacctctcaacattgttctccacctttagtggtacaggattagagcagccccaaaggactaagttttcttctttttttttttttttgagacggagtgttgctctgtcacccaggctggggtgcagtggcgcgatctcagttcactgcaacctccgcctcccaggttcaagcgattctcctgcctcagcctcctgagtaactgggattacaggcctgcgccaccacacccggctaatttttgcatttttagtagagacggggtttcaccacgttggtcaggctggtcttgaactcctgacctcgtgatccgcctgccttggcctcccaaagtgctgggattataggtgtgagccaccacgcccggcctgtttttttttgagttgaagtctcactctgtagtctaggctggagtgcagtggtgagatctccactcactggttcaagcgattctcctgcctcagcctcccaagtagctgggaatacaggtgtgcgccaccgcacccagctaagtttctgtatttttagtagaaatggggtttcaccatgttggccaggctgggcttgaactcccaacctcaggtaatctgcccaccttggcctcccaaagtgctagggttataggagagacccaccacacccagccagtttcatttctttttgagttataatttcatatggtgaactgcacagattttaggttttgacaattgcatttatttatctaacccatacccctgtcaagatataggacatttcctgccgggctcagtagctcatgcctgtaatcccagcacttcgggaggccaaggcaggcaatcacctgaggtcaggagttcgagaccagcctggtcagcatggcgaaaccccatctctactaaaaatacaaaaagttagccagatgtggtggcacatgcctgtaggcccagctactcgggaggctgaggcaggagaatcacttgaacgtaggaggtggaggttgtagtgagccaagattgcaccactgcactccagcctgggtgacagagcaagactccagcttaaaaaaaaaaaaaaaaaaagatgtaggacatttccatctctccaaaaaaattccctggtgccccttctcaatcaacttctgttctacctcctccttttcctctctaggcaactaccgttctgatttctgtaactataaatttgtttttcccattctagaactccatataatggaatcagacagttgaggatttttgacatattcttcaactctgagcctgttttatcatttgtaaagtaggcatgaaaacagtagtgtcattttaaagtggttgttcaaagaatcaaatgaaattatgtgaaaaccctttgcaggctattaaatgctacacagctgtccagttgttgctttttttcttttaactcagcctctcaacctaccagaataatgaagttatgctgtgagtaataacaccttgtgtttttatattgttcgttagccaccttgtaagggatggattgtgatcccatattacaggtaaggagacttcaacctagagaaattaaatgatttgattccagtcacataagtgcatgctggagtcagggactagagcctatgtctttacactctcagtgcagagttctttcttgtagtgcacaatgccatcagcattcactaagatcacatttttcagtttcttcaatggtggttttctgcttatttgatgcattaattctgacataaacactgatgttatcctagcttcacccagctttggggaggagaaaagtctgtctcctatctccaactctgagtcaggaccaaaaagtatctcttatttccccttcccactcttccttgtatcctagctccttgccttctcccctctcagactctgcggtggtgtttgaacctgggcatcctagaggtgacagtctacgcattcagcattgagaacttcaaacgctccaagagtgaggtagacgggcttatggatctggcccggcagaagttcagccgcttgatggaagaaaagtaagatgctatcagaggggagagcatgttcttccaccacccccagccttatcctaacccttgaaattctgttatctgaggcttacttaagggacttgcaactctttttaatgttagttagatatcttgggtggcaaatatcagaaatacaagatagtctttcattctttatttctaactttttaataaaaaagggggcatttatttgaggatattgaggggtgtcacatgatttaagaacaagtacagccagcctcaagcaaaactgaaaccaggaattaaacccactaggtagaacctctgtattcatttatttccacctctctctgcagaccagttttctcttgcttcaaaagagcagcctggaatcaataaaatcccttaattgggatccctaaattctatcagatttctaccccagagccaataaactatggccaaggaagtggagttaaagaaaacattgaggaagtcattttctgctgcacagtgaaccctaaaaagttactgtactccccctgcatagtcttttgggagggataggatgatgcataagagacatttatggggaagcatcagtaccattcttagctgtcagtaagtttaggcttaacttagggaataaagccagagaggggcaaagacaaatttcagtggagactgcttgcttcaaagtatggagcccttaccagccagaattgcccgaaagtcttagttacaactgttgtgtgcccagctcctacctgtaccaggaagatgagagaacagtgagcctagaactccagtgaagatgagcctagaacaatgggtggtagggagggtagccaggcttccttctgtctatattaggatggtgagactctgggctacagacattgctccccggtccccagcagagcctgtgtggctcagagtttacacctaaggagccggggatggaggcatggggggcatatcccactaatcttacctttttaaagtgtttactatatgccaggctttgagcctaaaatatattcttactcatcctgtaatcacattataccatgacaaagatattattagccaatttttagagagaaggaaagtagttaaccaaagaagttaaggcatatatcctgggtcacacagctatcagacaggcagagccaaggtgcacacctggatctttttgactccagagctgagctatcatctactacactgtgctctgagagacagaccatattacaattcctgcaagatcaaaacgcatggcagaagagatgctaatgagattgcgctgatcagttagtagtagagaaaatggtcttcgtttatcatgaagtcctggcaaaagcaagaagaaactcagaggtgcttttccattaatgtgccacagaaccccaaggtctgaggaggtgtagaaagaacctagtgggaatggggtagggggtgctgagttgcatttacctattttatgtgttgggcttctgtgtagaatttgatttgaagaaagggttctttggctaaaagaaggtgggaaaaccactggcctgattctgtttcatcagttgggaaactaaaccctagtaaagagaagaggttgagcaaggtggctcatgcctgtaatctcagcactttgggaagccaaggagggtacattgcttgagtccaggaatttgcttgattccagcctaggcaacatggcaaaaccccatctctacaaaaaaatacaaaaaaattaactggggatggtggcacatgcctataatcccagctatgtgggaggctgaagtggggggatcactgtgatgagcctggggagtctgaggctgcaatgagctgtgatcgatccactatgctccatcctgtgcaacagatcgagaccctgtctcagaaaaaataattaaaaataagtaaattaaaattttaaaaaacagaagacaagagcttacacatggtcacacatcaaactagtggcagaactataccacaagctagcaggaggagctgaatcaaggtcttctagtatactgccttcaattaatctcccattttccaaatgtgaagcattcggtttcttcatagcatttccagatgagagaagctggctgaattcattctcactgtatgcagagtttgggagttattgtatggaagcaatataatgtcataattaagaagacaagctctggaggctgactccctacgtgcaaatcctggttctccatcagctgtccaaacaaattacctaacgtccctgtgcctcagtttcctcatctgtaaaaggggaataataagggtatataactcagaggttggtgtaaggatggaatgtgttggtacatgtaaagcacttagaccaatatctggcatttagtaaacatagaatgttagctgtcaccattatcataatatttcactagaacataacaaaagtaccccataatacagctccttcccttgaggagtttactcacttctcaaatgggacaaacttcacagatacataaaatgcaactgcccaaaaaggacacatgaggtcgtgtaatgtatagtaaagagtttgggttcttgctggacatggtggctcacacctgtaatcctagcactttgggaggctcaggcaggaggatcacttgaggccaggagtttgagaccaccttgggcaacatagtgagacctcatctttacaaaaaatacaaaaattagccaggcatggtggtgcatgcctttagtcccagctacttgggaggctgaggcaggaggatcgcttgagcccaggatttggaagttaacactgaaccatgagtataccactgcactccagcctgggtgagagtaagaccctgtctccaaaaaaggggaaaaaaaaatgtagtttggggctgagcgcagtggctcatgcctgtaatctcagcacttgggaggccgagacaggcagatcacttgaggtcaagggttcgagaccagcctggccaacatggtgaaacctcatctctactaaaaatataaaaattagccaggcctggtggtgggcacctgtaatcccagctacttgggaggctgcggtgggaggatcgcttaaacccgggatgcggaggttgcagtgagctgagattgcgccactgcactccagcctgggtgacagagcaagcctccatctcaagaaaaagaatttgggttctcaaatcagacaaactgggtttcaatcctgacaaagcacttgatggctatatgaccctgggcagtccctatctgactgtcctgtctgagccttggcactgaagtaagtttctttcagagttgttgaagggatgcaatgaaataatgcatgtagaacagggtctgacacacaggaaagcactcaaaaaactggtggtcagttattacctgagcaccttgctctctccagctcagcaggggccctatcccaatgctgcctcttttccctgatcagggagaaactgcagaagcatggggtgtgtatccgggtcctgggcgatctgcacttgttgcccttggatctccaggagctgattgcacaagctgtacaggccacgaagaactacaacaagtaagttctcagatttccctatagggagctgtttcaatctttgattccctgctggctttagggagacgtcctgggctttccttggtctggattggtgcaaggggcaatgagagagtaggttgagcagcttagagactttctccgtctgcagggcacaccagacatgattctgcaataacatgttatatgtgtgtatactgacacatacacatagtttctctttcctcctttctctgcccagcccccaccaaataagtgtgtgtgtgtgtgtgtgtgggtgtgtttttacttgacagggaatgggatcggaatacagcagttcttatccctgactttgaagacagatccttcaagaaattcttgttctgttccactcctttaacctatggataggatgaccttgggaggtcatacagatgtacaggggaatagagttcaataatccaaactctgtgatgtgtagctttgaaatataacgtgtattttggcagtggacttgttttacatcaaatctccttcctattttcctttgtttgtgccaatatcacagtagagtcttcctctgaaagccggtgtacagtagaaggggagagggttaggacggcaataggagctatttggtggctgggcacagtggctcacgcctgtcatcctaggcaggtggatcacctgaagtcaggagttcaagactagcctggccaacatggtgaaaccccatctctactaaaaatacaaaaattagccaggtgtggtggtgtgcacctgtaatcccagctactcgggaggctgaggcagaagaatcgcttgaacccaggaggcagaggttgcagtgagtcgagatcacgccattgcacttcagcctgggcgacaagagcaaaactctgtctcaaaaaaaaaaggagccatttagtatttgtcttattataaaactagttacatgtttattccaagaaaacttggaaaccacaaaaaactcataatttcacctttcagaggtatccacaattaacatttgatgtgtatttgtttttctagggaaaggctggaagggcttctctgtaatcagtgacttcaatcatcagtccctgtccccctttggtaaattattctcttcttccctcctcaggtgtttcctgaatgtctgttttgcatacacatcccgtcatgagatcagcaatgctgtgagagagatggcctggggggtggagcaaggcctgttggatcccaggtatcccgagttgttttgcatggtaattgttaaggaaaacaggcctgggccagcatggcagctcacgcctgtaatcctagcacattaggaggccgaggtgggcagtccacttgaggcaggccaggagttcaagaccagcctggccaacatggcaaaactccctcttttcaacaacaacaacaaaaaagcaggcctgtaccaaaccataaagcccctctgtgccatgtacttggccagaggtctaattaggggagcatgtggaaagatttaaggggatctcccaaatttagagattaggattggcttattacaacctgcttcagaactagagttcaccacacaccaagaaaccccagagaaagagcaaagcagatgacaaagccatgttattattcctttacaaattataccctcctggccctttggtagtgtttttccaagaatgacttttcatgaatgcagtttgttggggctagagttctttaggtctctcatgttctagttccacacaagattcaggtgtttttcttttcttttttttttttttttttggtgaggcaaagtctcactctgttgcccaggctggagttgcaacctccacctcccaggttcaagcaattcttccgcctcagcctcccaagcagctgggactacaggtgcatgccaccatgcccagctaatttttgtattttcagtcgagacaggtttcaccatattggccaggctagtctcgaactcctgacgtcgtgatctgcctgcctcagcctcccaaagtgctgggattacaggcgtgagtcaccatgcccagccgattcagggatttttcaaaaagaaaattattaattattgtcaacatagtggaatcctaattattaaaggtggagagacttttgaagccatttaaatatttggtccctctcatgttattatttatgtaacttttaatatatttgtaaactaacagcaatagtaaaataatagtagcaaaaaataacccaggagatgtgttgtgttctgtatttcattaagtcattaaccttatgtgtgagagattcaaggctgttgtccattgtgtagatgagaaaactgagttcagcattgaagtgacttgcccagggtcactctactagtaagtgccagagctgggactcatatctaaagctgtttgattttagggttcttatcctttacctctattatgtgggatcttgggaagcaggaatttttctggttcccttcccgattcgattgacctaggaaactagattaaaaatcaaaaagttacttggtgagaatagaattagataaaaaggagaggagacagtttttgaggctattttatgaatgcctctccttcctaacagctgggtgacatttctctgtcacatagttcattcattcaacaaatattttatttttatttatttatttttattttttattttatttatttttttgagatggagtctcgctctgtctccaggctggagtgcaatggcgagatcttggctcactgcaacctccgcttcccaggttccagcaattcttccacctcagcttcccaagtagctgggattacaggcgcccaccaccgtgcccagctaattttttgtattttttagtagagacggggtttcaccatgttggcgaggctggtcttgaactcccaacctcaagtgatctgtctgcctcagcctcccaaagtgctgagattccaggcatgagccatcactcctggcccatttttatttttattttgagacagggactcactctatcgcccaggctggcgtgcagtggtgtgatctcggcccactgtagtctgtgcctcccgggcccaagcagtcctcccacttcagccttccaagtagctgggactacaggtgtgtgccaccatgctcagctaattctttttttggagacagagtctcactcttgcccaggctggaatgcaatggtacaatctcggctcactgcaacctccgcctcctgggctcaagcgattcttctgcctcagcctcctgagtagctgggattacaggggcatgccaccatgcccagctaatttttgtatttttagtagagacggggtttcactatgttggccaggctggtctcaaactccccacctcaggtaatccgcccacctcggcctcccaaagtgctgggattacaggcgtgagccaccgcgcccggcggttttagacttacgttacagtggatagtggtgcccttcaccatgctaggtaaccctgagagaaaatccagttgaaaagggtcagcagtttggttttggatatcctgtacatgttgaacagagatgtcaggtcaacagttcagcgagggattggtatagtcaggtcaacagtcagacagagatgtcaggtcaacagttcagacagggtttatctctgtcgccagtatggaagccatctgtgtataggttaacttgagcaaagaggggatgagaaagctaaggagagtctgtctgtctatctgtgtatttatctatttagagatggtctcacactgtctcctgggctggagtgcagtggggcaatcaaagctcactgaagcttggaactcctggtctcaaaggagcctctcaagtacccagtactacagacgtgcaccacctacccagctaactttttatatttattttttgtaaaaacagggtctgactttgttgcccaggatggtcttgaactcctggcctcaagtggtcttcttgccctggcctcccaaaatgctgagattacaggtgtgagccactcagccctgcctgttaaggagtgtagagtgagaagaagaaagagcctaagatggcatttttgaggaactctaccctttactggctgggtagaggagaataagctttataagcaaaaacacagaaaagcaggaagaaaaccagggcagccagcattacataagccaagaaaagagggagtttgttggtgcaagttgggaaggggtagggcacccatggaaacaatggtgtcaaatgctgtagagaggtcaattaagatgtagagtgaaaatcagctgttgttaaaacaattaagagactggtggagttagcagaggtagagagcaggcaggaagatgagacagaaaaggggtatagaaatagaagcatgttttcaataaaattcttagtttggaggtactttcgtagttcattatatttttgtgctttataatgaatatgtttcaaatattcttgtatgtatgaaataaatattaaggcacaagggttgacactagaatgaaagaaagccatttgacaagcagatctaatatgcattatgcctaggactctgatcttgactcctagtccagcatgctttaccctcataccacattacagtaaccactaccttatctcctgcttcttgtccagcaagtttttccatatccttctctgtcctgcatggtttagtaacttgcctctgtggggttagttatgcagacagggtgtgggttgggcagtatcaccagggtcaggaggccaatgtctcaacccaccaactcctgaagcttggtgtgctcagactgggctaatcagggcctgaggcgttacactttatattattcgaatttagacaaacctgcatttataacaaagtcagtgcgttaattacaattaggtcctatgcttctaatagctggaattttcctgatttctcactatcaccatccaactcctcatttttctttcttccagggtatgtatgtagatgtgtgtgtgtgtgtgtgtgtgtgtgtgtgtgtgtgtgtgtgtgtgtatttttgtttttttgtttttctgagatggagtcttgctctgttgcccagggtgaagtgcagtggcacgctctcaactcactgcaacctccaccttataggttcaagcagttttcgtgcttcagcctcctgagtagccaggattataggtgcacaccaccacacccggctatttttttttctttttttttttttttgagacagagtctcgctctgtcgcccaggctggagtgcagtggcacaatctcagctcactacaacctctgcctcccgggttcacgccattctcctgcctcagcctcctgagtaactgggactacaggcgcctgccaccccgcctggctaatttttttatatttttagtagagacgggtttcaccatgttagccaggatggtctcgatctcctgacctcgtgatctgcctgcctcggcctcccaaagtgctgggatcacacccggctattttttgtatatttagtagagatgggatttcaccatgttgaccaggctgatctcgaactcctgacctcaagtgatctgcccaccttggcctcccaaagtcctgggattataggtgtgagccatagcacctggcctgtttcgttttgtttttgagacagggtttcactctgttgctgaggctgaagtgcagtggtatgaacatggctcactgcagcctagacctcctgggctcaagagatccttccacctcagcttcctgagtatctgggaccacagatactgctaccacatctggctaattttttgactttgtagagacagggtcttgccatgttgtccaggctggtctcaaactcctgggctcaagtgatcctcctgccttggcctcccaaagtgctgggattacaggtttgaaccacggcacctgaccgaggtatatatgtatttttttagcagttaaattaatagattgttttgtgagtctggaaattatagaagaaggaagtagattgagaccaaaggatagttaataaattctattccaccgtgttaccttgaacgggctacttgattccctgtaggcctctgtctttcttataaaacaatagtgttaatagtaattgctaacacttactgagcatttactctgttccaagcattaagtattccacatacatttatccttagaccctataaggtagatactgtttttatgcccattttaaagatgagaatactgagacatggagaggaaaagtaacttgtgcaagttcacatagttggcaaacctgggggccaagatttcaacctggcttcagagcctgtgttctcattcactgtggcatattgacttcctcatagcaaagctgaaatgaacaataaggcagtaaaaaagaaaaaaattagatggacatggtgacttatgcctgtaatcccaggactttgggaggctgaggcaggaaaatcgcttgagccctggagtttgagaccagccctggcaacacggcaagaccctgtctctacaaaaataaaacagttagctgggtgtgctggcacacacctgtagctacttgggaggctgagtgaggaggattacttgagcctagcaggtcgaggctgcaatgagctatggttgcgccattgctctctagcctgaacaacagagtgaaaccctgtctgaaacacacacacacacacacacacacacacactcacttttgacataaatatttataacacatgaaatcacataatgaatagtttacactctgaatcatgcttttatcattcaatgttacgagtacttttcatgacccgtgtttttaataattcttcatatcattatttataatggctgtaaaatatatcttgtgttaatttctttaaccagtcttctatttgttgggtatataggcagtttaatatttcattattacaaataatgccacaattaaatctttgactgaacttgcctgcattttttattgtttcctcaggatctgagtttgaaagtgctcatttcaccttattcttgccaagattttttaaatgtaaactgttctgaccaggtgcagtggctcatacctgtaatccagcactttaggtggctgaggcaggttggatcgcttgagctcataagttcgagaccagcctgggcaaaatggtaaaatctcgtctctaaaagtacaaaaattacctgagtgtggtggcatgcacctatagtcacagctacttgggaggctgaggtggaaggatggcttgagcccaggaggctgaggctgcagtgagccaagatcacatcactgcactccagtctgggtaacagccagatcctgtctcaaaaaataaaacaaaaaaataaacctattctcataggtaaaaactgatattttaccgttatttaatgtaaatcatttccgaaaagtcttcacgtagacagctttaactcaccattccatttagtgatggatttttgttggccaaagtctacagatgttccattttgattttgtcagtttcatctttccaccctagagttaacccctttttttttgtttttgagatggagtcttgctctgtcacccaggctggagtgcagtggtgcaatctcggctcactacaagctccgcctcccgggttcacgccattctcctgcctcagcctcccgagtagctgggactacaggcgcccaccaccacgcccggctaattttttgtatttttagtagagacagggtttcatcgtgttagccaggatggtctcgacctcctgacctcatgatctgcccgcctcggcctcccaaagtgctgggattacaggcgtgagccaccgcgcctggccaacccctttgtttttttgagacacagtctgctgtatcactcaggctggaatgcactggcacaatatcagctttttccattaagaattctgcccactgcagaattcttactgcatacctactgcctaaagtaggtagaagaaactctttgcagataaattgtaaactcagagagactgagtctctgaagtcacactgcaagttggtgggactgaaaataattttttattattattctttatatagcactttatagttcccaaagtgcactcaaatctattatttcatttgatttgaccctcatgataacctataaggtggataggacaaatgggccctgtttttttttttcccttttaattacatttattttaatgctgaatttactcctgtgccataagtttttgtttcttcagtttctttgggatatcattttcttctgggcaacctcctcttctggtttaggaacaatctgttccttttcagtaaggatcatctcaatgtggcagggagagctcatggatgggttaatccaaccatgagctctgtaggtccagcggcacatcttaggtgctttgttcacttggatatgctcaatgaccagagaatctacatttaaacccttaagttcagcattactctctgcatttttaagcatgtgcagcaaaaattcagcactctttttgggccactgaccttgtgtccagccccactgcttggcctgggcacacctgccagctccaccattgtaacgtcggaatggtacgcactgtttctgtaaagtgacatctttcaggtacttcatggcttttcgtatatgcatacccttgatggcctgggcagtttcacgaatattcttaaagtaaacacgaagattggaacctcttgatttgcatgatatcatgaggttctccgggttaagtgaatagtgaaccattttcacagattacctcaggccgcttagggaaagagcaaatgggcccattttaaagataagagaatgagaaattatatggattgtacagagtctcacataacttggagaattaagaccatgctgccaagacaagattgtcagattaccagagaaatctgaaccagagcccttcttattgctcaattataagtgaatactgtttcctctgtgatgatgatacggaaaagaaagctctctctgtggtttgccttaaaggactgagagagatgagcaacttggctgggtgcagtggctcacacctgtaatcccagcactttgggaggccgaggcaggcagatcacttgagctcaggaattcaagaccagcctggccaacatggtaaaaccccgtctttactcaaagtacaaaaattagccgggtgtggtggtggctgcctgtagtcccagctacttgggaggctgaggcaagagaatcacttgaacccgagaggtggaggttgcgggagccaagattgcgccactgcactccagcctgggtgacagcgcaagactccatctccaaaaaaaagatgaataacttgcctaaagacacacaactagtaagtgtagagtctggttttgaacactcagcccagatctttctgctttcctgaccatgcgtccagaaacatgttcccaccaagaaatttttgtcttctggaccctttccaagatgtaactctaactacctggacattctgaattctgcttctgggtagttggtaggacaggtaaacagcattcttggagccaacagacaccagccatgcaaataccctctttctgtggacaggatagttttacttaagataaatgcttccactcaccagttttcttcaattctatctcctttctgaccatctctgtgcttgggaaagtagctcttatcaaacacaggagaactgatcatattgctgtttatttaaaatccggtgtaatgtggaatttttgcaatgtttcaggatccatatgacttaaataagattttaaaaataaattagctgagcatggtgttgcacacctgtggtcctagctacttgggaagctgaggtaggaggattgcttgagcatggaaggtggaggttgcagtgagctgagatcacaccactgcactccagtctgggcaacagagggagaccctgtctggaaaaaaaataaaatatgttttctgtttttttttgttttgagacagagcctcgctctgtcactcaggctggagttcagtggcataatctgggcttactgtaacctccacctcctgggttcaagcgattctcctgcttcagcctcccaagtagctgggactacaggcatgcggcaccacacccagctaatttttgtacttttggtagagatggggtttcaccttgttggccaggctggtctcaaactcctgatcgcaggtgatctgcctgcctcagcctcccaaagtactgggattacaggcatgagtcaccacgcctggccaaaaaaagttatttacataaattcaaacaataacagaagtacataaagtaaaaagaaatagtcttttcttccttacttcttatccaatccactgttaatagtatgatgtatctttttagactttgttctttatgtatacttatatgcacgtgtgaatgtttgaatgtgtgtgtatgttttatactatatattctctgaaacttgccttttacatttaacattagattttggacatctttccaaatcagtgcatttagatttatctttatttttagaatgcagttgcatagtatttcatcaaatactgggccataggatgtatgtatgtattttaaaaaacaagatgtttttagcaaaagacaacagatatttttgtgggtgcatctggttttaggcctgaggctaaatgactttcagcaaattattcatctttgagcctcagtttccttatctataaaatgaggatagaaataccttatgtatctgctgagcatggtggctcatgcctgtaatcccagcactttcagaggccgaggggggggcggatcacgaggtcaggagatcgagtccatcctggctaacatggtgaaaccctgtctctactaaaaatacaaaaaaaaaaaaaaacaaattagcagggtgtggtggcgggcacctgtagtcccagctactcgggaggctgaggcagaatggcatgaacctgggaggcagagtttgcagtgagccgagatcgtgccactgcactccagcctggggaacagtgtgagactctatctcaaataaataaataaataaataaataccttatgtatcagaacatgtcaaaaaaggcaaaaaataaaaaagagaaaagaattttacattgtattctctaaaaaaaaaaaaaaaaaagaaataccttatgtagttgtgaagatttaaattcattcattaatttagcaaacattttttgagggccttctgtgtagtattggctagtgtatttgatggtattgtataaactgagaagcctatatatggaagttcaccatgagaacactacagaaagagaatactacaggatgtgtgcctctctttgtctcttcttgctcatcttagtgatatctctgagtctctgcttgataagtgcctctataccaaccgctctcctcatcctgacatcttgatacggacttctggagaagtgcggctgagtgacttcttgctatggcaggtaggtcatttccaagtactattatgtttgtgtcatggggaaaccaactgtatccacagaatggatcagagtggtccatccccactcccaaacaggctggggccagagtacttctggggaaagctaaaatctggagaagcatctctaggctgtgtctcataatatttgatgtccattcctcatctgtcgctggctttgcgaatccaactatagtgaaaacttcattgtgccgcttttcaaggaatgggacttctgtcttgcatccctgagcgtaagctcttgccttggtaacctgccagggaccctagcccctctgggttggaagcttgccttgcagttactagtccctccccttcaggataaagggccatacctatgcaagcatggtaaacaatatgcaaacactcaagtctctatcccctgttaacttggtccctggagagcacataactaggggaagtccttgttctgggagagactccatttggaagcagctcacatgataaagctccagaaattttaatggaccacaatcttaaaagtgagctaacgcagggcgtggtggctcacgcctgtaatcctagcactttgggaggctgaggcaggcagatcacttgaggtcaggagtttgagaccagtccagccaacatggtgaacccctgtctctactaaaaatacagaaattagcctggcatggtggcaggtgcctgtagtcccagctacttaggtgaatgaggtgggagaatcacttgaacctaggaggcagaggttgcagtgaggcgagatcgtgccactgcactccagcctgggcaacagagtgagactctgtcgcaaaaaaaaaaaaaaaaaaagaaaagaaataagtacaatgtgcacctattggttctgtggcccactgtgctgctcagatcacgtttgggaagtttactgatgggctgaattttaagagactacagagtcagttactcagtgtacagaattagttacattgacaaacttgaggacttactggaagaggccaaactggaaagcaaggaatctcatgtcttacaaaaaatgaggaaaggatagtggtctgcaaaagggaaataagtgacaatgtattcccttggaaaaaagtgttgagttccttctttatgctggaaatatggcagtgagtgagtcagaaatgatccctactgtcttgaaacttatagtttgctagcaaagacaaactctgaacaagtcattacaactttgggaactgataacaggcagctctaatctagccttgaaatacttgaaagaatgtcactttgaagaagaaacaaacttgttccagaaaaaatacctgggaccttagtagaagttgtagggaaggtgacattggtttagcataaaaagccaaacaggctatcggacaactagttatcccccatgaggtactgaattcctcaccactagagatatcaggcagtggctgtcaagagtgttccaaaggggattcttcatcagtgattattattaaagtacacctggctctttgctatgcatatgttatctcatttaatctaaacagtaccctgaaaattaggtattcctattatccagttttacatttgaggaatctcaggccaggtgaaattacccctgctcaaataaatggtaaatggttggagccaaaattcaaagccaggcagtctggctccagagctcatgctctcaaccactgtgccctgctgctggtacttaaaaataacaatggcagctaccatttgttcattggtgacctttatcagacagtatgtcttccagatgccctctaagggccaagagccaataacataatccagatgttatttcatagtcctaaaattggctcttagaaaaatcctggtggaaatgttgatctagtctcgttttagttctgctttaccacaggcaggtgatctggctgcctcaagtgacgcctccccctactagtgaatgaatcagggccagcagcagctgcagctacagctcaggatgcctgtaacattgtcatctctgggcttctgggtcctgcttagcctgctttttccctggaggactgaccagggatgcggcccagcaacatgttactaaatcatactctcctccctacctttcccagacctctcactcctgcctggtgttccaacccgttctgtggccagagtatacattttggaacctcttcgaggccatcctgcagttccagatgaaccatagcgtgcttcaggtaagaaagagttcagggctggccagatgggatgggatggaagaaaagattagcattgattgacaaccaccttactatataccaggcacttcctaataagatgatgataatgatgatagtagctaccacctactgagtatctactacttgtcaggcactgcgaacattttacatgctgcaactcatttaatgttcccaagaacccaatgagggaagtcttattagcccctcccttatgtaagtaagcaaacagaaatgatttagttaaggacacataatcagtaagaggtaggaataggatttgagctacaggtcttttatcttttaaagactcaggaggaaaaggcttctcagagaaactggccattattcctttaaagtattaccctaataaaagatcgtagcagtagggattaagaactaaatagcattgtctttccattgtgtaaacctatgttgtgtcaagacttgaagtttgactttcagttttcatcaccaaatcttgaaacaggttttattagcagtcacctgtatatgattaggtctctttataataatggtagtggtagctaacatatgaggatctacgagggcacttaggtgatttcatgtaagttttcttatttaacctaacaacccagcagttttggtgtcctcatttttcatatatggaaccagaggggcagagagacttaagtaactgtcccaaggaacctgaattttatctttatttatttatttattttgagatggggttttgctcttgttgcccaggccggagtgcagtggtgcgatctgggctcactgcaacctccccctcctgggtttgaacgattctcctgtctcagcctcccaactagctgggattacaggcacacgccaccatgcctggctaatttttgtattttcagtagagacagtgtttcaccatgttggccaggctggtcttgaactcctgacctcaggtgatccgcccaccttggcctcccaaagtgctgggattacaggcgtgaagagcctgaattttaaaatcaaagctggtgctgcttcttcagtctggagagataatgccaggaggaaataatgatgtgagtcagggattcttaatctccttggtattggggtccctttgaataatctaatgaaagccacagaccatctccctagaaaaatcgcagatcactcaaatgtggaattttgcatagaattgtaaacttatcatggaaacacatagaatactttttttttttttttttttgagacggagtttcgctcttgcggcccaggctggagtgcaatggcgcaatctcggctcaccgaaacctccgcctcccgggttcaagtgattctcctgcctcaccctcccgagtagctgggattacaggcatgcgccaccaatcccaactaattttgtatttttaatagagatggggtttctccatgttggtcaggctggtcttgaactctttacctcaggtgatccgcccgccttggcttcccaaagtgatgggattacaggcatgagccaccaagcccggccacacatagaatactttaagggggttcacataactgctgaaatctgcccctgaatcccaagtccataactcctgctataagtaaatcaaatcacaaagacttgatcatgtatttaattacttagtctcagaatatgaggaaattaaaagaagtttagaattagtgaaaagaaaaacagcaaaggcacaattatccactgtcagtggggaatgaatatcagatttttccatatgaccaaagctccctctaaaaactaaaactttacccttttttgatggaaaaatttctaaaatgtatcttgtacataattcattgaaatctatataccaggcacttgctaataatgatgatgattaggataatcacgtgctattttttgtttttttttttttttagcagggtctcactctgttgcccaggctggagtgcagttgtgcaactttggcttacttcagcctcccaagtagctaggactatgggcacacaccaccatgcctggctgatttttgttattttttgtagagataagtcctcactatgttgcccaggctggtcttgaactcttaagctcaagtgatcctcctgcttcggcctccccaggtgctaggattatagacatgagccaccatgcctggccgtcatattctaatgattatgataatagtaattatcatctttaaacacttcattgtacaacaatatccttgaggggtagggctgtttgctctaagttagatggtcccagaatacctgggtttgaggtttcatgtatatttttctgtgtcctccctctttcatttcctactgctgtcaacagttaattttgacagtatctctcctcttccatagtatttactgttttaaatcagctatagacaaggaaaccagatagtcaagcttgttggaattatgtatataaaatgagagtgaactggctctgcatgaagcccaaaggagcttggtgcatgagtttttgtgtttttacctctaattgggctgctcagaagtcttttatagtaatttcacgtttctcagatactttgcatatggttgtcagaggagttaactcaagtttcattcattccataagtatttattgagtagtatgaatcaggcactgtattaggcacaggagagtcaacaggtagccagagggacaagatctctacctttgtggaacttgtattcttgaggagacagaaataaacaagtaaacaaatatataagttccgattgtaataaggcagtgaagaatacagagtgatgtgctagaaagtaatgaagagaatgcaaagagactgaggttaaagtttgggtcttggaagaacaaaaaagaggtcaatgtgccaagggagaagggcaggaaatgaggctagagtcagaccttggctcatatagagccttgtaggtcatggtaacaaagctgaaggactttaatcaggggatgacgggatctgagttgcattttgtaaaaatcattcagaattttcaacgggctggagttaaagccaagagacagaactcctgcagtagtccaggtgagagaggatgcgcctcgaggtagggtggtggcagtagggaaggggaggagtgaagacgggataaaaacaaatgttgaaatagaaacaagtgaaactagctatatcaaggtgataatataactccccagagaaaggaattaattcagcttacctgaacacagttctctgctattcatctttagtggaatttcttttcaggataatacaaactgcaacacaaaattaaacattacttaagaggtttattgttagtggcaatgttggtaatgtaattatgaaactcttgtttctttttttttgaaatggagtttcgctcttgttgcccaggctggagtgcaatggcgtgatctcggctcactgcaacctccgcctcccaggttcaagcgattctcctgcctcagcctcccaagtggctgggattacaggcatgtgccaccacatctggctaattttatatttttagtagagatggggtttctccatgttggtcaggctggtctcaaacccccgacctcaggtgatctgcccgcctcggcctcccaaagtgctgggattacaggcgtgaaccaccgcgaccggcctgaaactcttgtttcttgtaggctaaaacaaataagtacaaataataatgttattaggaaccaagacacttaggttgtggccatagcaattggttgtatagttctgctgtttcctgggatggggtggaaggtgtttgaggtcaactattaagtgttccatttttacctatggatcatatttgcaaacttttttttttttttttttttttttgagacggaatctcactctgtcgctggagaacagtggcatgatctcggctcactgcaacctctgcctcccggattcaagcaattctcctgcctcagcctcccatgtagctgggactacaggcacgtgccaccacgcacaactaatttttgtatttttagtagagacagggtttcaccatgttggccaggctggtctcaaaatcctgacctcaggtgatccacccaccttggcctccgaaagtgctaggattacaggcatgagccgctgcgcccggcctatatttgcaaacttttattgagttcttaccacatgtcaggcatccttccagtattgagttcttaccacatgtcaggcatcctttcagtaaattctgtgaactgctttaaggcagatactattattattgcctctgtttttagagcaaggaatccaaagttataatagagatactgattatcttgaagccttctccagcaggagcccttggaggtcctggccaggctttctctaccccagaagcttcaaagctctgtttctagaaatcatatcaccttggcagatgcactaaggggagaatccagactaacagcatcctcaccagtttgttctcagaccagagaggtctttccaggcttttctcatgtctcccttttacagaccctgtatcatggccaaactggactcttcccagttacctgttccatgccctccagtttcctacctgtatgtctgtgctcttgccccatcacccaaattcccattttaaaatctgagctgctctgtctctaggccctgcccaatgtgtccctattctctgcaggaagccagggcaaggggctaggctctggacctagagtagcttactgagaggaaggcagcgggtggatcgtaagggaagcagggacttggctacaagttgtggggagccagaccttggtatctgaatggaccatgacagtctccaggtggtcacctagccagtcttaaaggctggcaaagggagatcttgactatgatgcagtaggacttgtcagcaaagaggcagggacaaatagagaatcaggccagggagggggtgtgcggcagtgcagagcagctgatcctcaatcacaagttgcatggatggtaggtccttgagaggtcactgatggagatgagtaaaaagtgttcacctcatctccaaggatgatattagagagggaaaagacacatgttcccacgaagcttcctgtagtacatttgtcacaatttaaacgggctggattgaacattatatttcttctgctcttcaggttgtcactatcttctcctcaggataaaagcttgagttatgtatgtatgcatatatgtatgcatgtggaaatggggtctcgccatgttgcccaggctggtcttgagcagctgggctcaagcgagcctcccaccttagcctaaaagcttgagttaatgtctcagacattcatgactttgaatattggcactgcctacatagctatatgactgtacagttacttaacccctcagagtatcattttcctcacctgtaaaatgagagaagtagcgtttacagtaatacctaccttgcaggtttgtgatagggattcagtaagctaacacatgtcaagtgctgagtgcagtggctggaacagagttcattttccaagaatggtggccaatattgttccccacatgtgtgtctcttggcctctcctcagactcctctctggaaaagcaccctgcacatcctgtccccagtacaactccccaggcaaggagactctgagggtgcttcagaacatcatgtttctggtaggaggtgcccttctctgcctgagagcagccctcagaaatgcattcctcatgctgctgacctgggctggctggttgcagcttggggaaggacttttcattggctaatgttttgaagccaaggacctgcagcctctctccaggtgccaacagagtggtagaggacttttagatttaagtactggagggactattacatcttgttctctgattctaccaaggagagaataagagcagagagggataatgcccaggaggaatttagattcataggttagaaccacatttctcaaagtgagcttcttggagcccttgcaccaagattggataaggtctgtacaaaaagtctctaaggaaagaattaacgccctcacttaccctgattggtcattatacaaggatagtagacaaatggtcagggagagaaaagttgacctctaggacttctgttagcttggatttcccaagggtaagtacttgagaagaactggaaacacctctgagattgaaagggtagattcagaccatgtggaagctggatagacaggtatccagatacaggccaccagcttttccacccctagaaagtagagcttatacacaggcacgagatacacttcacattgtcctctcaagaagttatcttagtggagaagccaagggaacttcagccatctcagcctcgctgtcattttctgtaaaatgacgagcagacaccctcccaactctgctatctgaacaatgaactgctaattcctggcagacaggggccaggctctgcctgggctacagcccccattgctggcatgcactctgatgccatctggaagaagcttgcgcctcatgaagtggctttagctagctccatatttcctccctctgttgctgagcgtcccccatcctttctgttctgccagaaacttagactacttagcccagtccacaagtggcggtgatagaacagctaacagttaatagccaagcagtaggctgaaaattcattatctcatttttcctcaaacaacccagtgaggtgggtactcttatcccggttttgcagagtaagagagagccttagagaggtgagggaggccttaggaacttctcaaaccccagtgctccaggtggacttactctggccttaacaggctcttcggttccatgcatctttgctcattactcccactgccagaatattctccctgccccccacacacctcacctctgtttgaatcctcctcattggttaaagggccagctcaaattctgtctgtccatgaaggtcactgctccgtgatgttcatcagccacacttgctttctcctctgaactgcatgacccttaccacatcctattttgcatcgtggcactctgtgtgcatggctgtacaatcagcctgtaagcacctggattgctgggatcgtgtcctgcgcatctccatatcctcaaaaaaaatcctgtatgtagcacccagggagcctcctgaccaaggcctggaagaagcccttccagcaagacggagagctctacggcaactgttcaagcccgaagtcctcatagctccacatgtaattcattgtaatagcagaagagaagtattcttgaatgcctgggattattcaggagccgggggggacagtccagaattctcatttgtcatccttattcatgcagtaaacctttattgctgagagacagcaaatcagttccctgctccatgtctgtctccagcagaaagtacctccctcacagctccattgtgagggtcaagtgaggcaacagatgaagtggttgtgcacatgtaagatattctttaaaccatgaagacagagcagtcaaggtgcttacaggctgattaggacaaaaacatgtatacaagtttatcgtaatacaaggtagaatgtgggaagggtcatcagggtataggataccataggaaaatagagtttctcacacatggaataggtttggcaggaggagctctagtgcaaaggctttgcaggtcagttagactggcaggaacagagaggatcagtgaggcacaggaaagccttggttctgctccaaagggattttccgctcttctgtatcaggagcatcctcactgctctcctgggatcacgtggtcagtcagttgagtgtttcacatgtacagggcaccccaagtgctggagaggaagaagcccagtctctgccctctagtacttgggatgataactgctgccagggagtatgatcaccacctggtgtcagagctggttgcaagaggcttgaaggctctcaaacttccaagggcttattttctaacagaaagagtggattgtgaacactaacacttattctactatgcagaatgcaataagtggcttaagagagttgaacctgcttctcagaatgttcataggggggtcatttgctggaaggatcaggctggtcttcatacaggaggcaagtctggagctctgaaaaatagcctagggagtggggaggatggtaccctcagaggaaaacctggggagatcaaaggaagtgacccaagggacatgtccccgacaagaataggacctttcttgcagcggagaatagacaataacaacttgtaaaattgctgtttctgtctaagagcctgctaatatcctagagaggattttgcatatgttatctctaatccttaaaaccactcttcaaggtaggcacaacccccactttacagatgaagaaatgaggttaggacaggatttgcccaaagacacaaagccagttgatgggggaatcagaagtcagacccacatttgtttggttccaagagcatgagaaaaactttaagaagtacagacgcttccacacaaaacaaaccaagatggacccagaattgccactgccctgcctgtacaacatgagcaccacccactgcatacctactcccaagccttttcaaatctggtacctactttccactgttccacttcacttggcccaccctgtgccccaccccctacctcctccatcccagtttcacccactcctaaaaatgatctccccaccccaatccccacttttctctagcagaaggcccgagacatgtatgcagaggagcggaagaggcagcagctggagagggaccaggctacagtgacagagcagctgctgcgagaggggctccaagccagtggggacgcccagctccgaaggacacgcttgcacaaactctcggccagacgggaagagcgagtccaaggcttcctgcaggccttggaactcaagcgagctgactggctggcccgtctgggcactgcatcagcctgaatgaggctggccacctgccactttgccctgccctctgcctccagggctccactccccttccttttcttggtgaaaggcacctcctttcctgataa

SEQ ID NO: 15551 - DNA, 74741 bp, Homo sapiens
ccttctggaatcttgtaacggttctaacagctgggtgcgggtggagctgcgggtgagtcctcggctccggatccatttctctttgttccctaggaccccctcccacagagtccgcctcctcttccccgctctcccagccccctcctttgcctgttaacgtcttcccctacctgcatcctgaccatcatttgctgtgcctgctcctcggctttctgtcttcacgacctccttaggctgtgggcgaagacgtcatgggactggggctctgctgccttcgagtgacgacctgttaacccgtttttcaggcgatcgccagctcgagtgcagattccttgctgtgaccgaggttcagagtgagctctgtcggtgtgtcagtttgcctcttcaggtgattgcacgtctgtgtgcgagtctctccgtgtatgggtggctatgattagggtgagcctcagactggaactcaagtctaagttcattcactgctccagcaggcactcttcaatgaaacctcatcagcagatcgggctctcttcccttgccttgcctcctaacccccctaggccaggtgagggggacagggtactgggaggtaagaaggaactcttctgcaaggagggctctcacgtctgtcttaggcctgctccttaccagagtctttggggaagcagtagggagggcctgagggtctcaggaaaggctctctgctggtctggctctgctctgtagctccatctatttccctgtcccaggtcctttcttcctcctaaccccattgactctgaccatcccctgcccagagcctgaggtcccttctctggcccctctgctgggctggcccatgcaggtgaggccccgcatctggcatcctggaactggcagttggagcctgagctatgggcaaggtcacttcgacagcagttgaatgcccagctcctcatggtcccggaggagaggagggtaggtttgtcttctgatgagacatcatctgattcccttaagtcttggcactccatatgtgtcttggacagcaaagaacagcccttggcctgccagcagaaacagaggcagttcgtgaagccagtgactgagtcagagcagcccacagtgctggaactcctgctagctgagctccgaactctgttctcagctgtgttgcaggacagtagccctgcagcttggcgctatcttcatgcagtactgggtctactgcctccatatcgtgagttgctagttggccaccttgatttgctgcccttcctggagcagctgtactgctgggcaccctgggtccaaacccacctccatctggacctgctaggtgccattgtccaggcctttcctccagacagctctttgttagacagtgcttcccatgctgactgctgtccccagaagcggaggctccatcacaggcccccatgcccagcttgcccttttgtgcaggcccagtggagcaggcagcaagtaaaggaggagctggccacctggctgcgaccattgacactgcctgagctacagcgctgcctgggcattgttggtgctcaggtggccctagaagaggctgtgtggctggatggacttagtctccttcccttggcactggcagcggacatccctgtacggtatgaaagcagtgacactgacaatgcagaggtggagcctgttggaagaaaagagaccaggtaagtgagggactcagtctagggcttgagcagaggagaaaaagttgctgttttatgggtgcctctggggtcacttggaagtttagatccagctctctgtttatcacagggattagcccaactccacacaaagctagtgtgaggctactttcctcttcctttttctctgcaaaataaacccagtggtgttagtcttaatccccatagagaaatacagaaattaatgaaaatcagaagtcagctatgaggcagccaaagctttagaataacagcttgacttttcagtttccaggtttttttcttagatgatgtcagaagtctccttaattatttttctataattcattcataatcactgaacattgcctgggcctactgtgagttgattcctggatgttgggtctttccctcaaggtacccctggggaatgtgtgtccgagtgtccttcccacatgtctatgtgacttaaaccggctccaaggcagagtggagttggcagcactactggatagaatttcattttgacccttccagagtcttcttcttgccctgccagtgtgggcactctggccccttgagtgatatatttttcttttgtttctttctttctttctttccttttttgagatagagtctcactctgtcgcccaggctggagtgcaacggcatggtctcggttcaccgcaacctccgcctcccgggttcaagtgattctcctgcctcagcctcctgagtagctgggactacaggcacgtgccaccatactcagctaatttttatatttttagtagagacggagtttcactatgttggccaggctggtctcgaattcctgacctcatgatccgcccacctctgcctcccaaagtgctgggattacaggcgtgagtcactgcgcccggccctattgttttcttttttaaaatatctggctatcagagctctctacaggatttcagaatgcttacagagaccttctcttctcagcgttctctaactttcgatttttttttttttttctgaaacagagtctcactctgtcgcccaggctagagtgcagtggcctgaccttggctcactgcaacctctgcctcacaggttcaagcgattcttttgcctcagcctcccgagtagctgggattacaggctcatgccaccacgctcagctgatttttgtattttcagtagagacagtgtttcgccatgttgaccaggctaggtttccaactcctggtctcaagtgatctgctcacctcggcctcccaaaatgctgggattacaggcataagccaccgtgcccaagagagttttttaactttagttttggaattctccttgtcctctggcctcattttctagacaatgctttgcagctgtctgtggcacatttactgttcgggaagaaggctagttttacctttaattaaggttggcttcctcagtttttgctgtaagtttatggctgggtcaagtctttccattaaagcctaatgttagatagataggcaggctcctggggccctaatgggaggtggccaatgccataaatttatggtggccctattggaatcttttcctttttcaaagagctgccctgtgccttgagtacaagtttcctttcctgggagaacttgactgaattggcatgggctgagatgttgggaagggatcaagttctttgccctccctttgaacctggcagtaaacctctgaggtctagctaatatggcttaatttgcattacgttctcccggagtggtttgccaggcattcattcattcaataagtgttggatagctacatttattaggatctgcaagatgctagggatacagaagtgaatgagacagactcaatcccttcacttgaggtattacagtttagttagggagatatagttaagttgataacaagtaaaatataattacaaattgtaataagtgctataaaacaaaagaatactgtcttttgcctggctgcttctctgcaggtgggagagagagagagagggagtgtagttagggggaaagcatgtggggggagtgttcaagtctagattagattaacaaaaacatcaaacagagtttcaaggaggagggagcagtcagtagtattacatgttaaatgagacaagtaagaagaatgaaaatgttcattggatgtagtaacaaggaagaggttaagttttgtggggaggaagctagattgtggtgcattgaggagtgaatggaagatgaagtggaaatcgcattttacgattttttttgtgaagcttagcttgaagggaaaagacaaatagcagggcagcagcttgaaagaattttggtgtctgggtagggattttttttttttttttgatagagagatgtttatatcccttaacacagtgcttgagaagtaggtgctcaataaatattcgtagactaaatgaataaatagactaaggtaagaagaagagtagattaaaaatatatcatagagaataaggggtccagagcactgatggaggaattaatcttacagagaagaaaggatacctcttcctctgaaatcgggggacagataagtgtgtgggggaaggcaactgaagttgagggaattggctaatggctgaaaacttcagctttctccaggcagagaaggagacagagaatgggatggaactgggagctcagcagggcttgcatggggttagggatagcagtttgagaggcctgaaagaggtagctgtctgaggacttgtgtgaagacatcaggcagaatgagcccacagctgattggacaccaggaacccgtagaggagcaaatgtccttggttttgcgatcttctgaatatactatataatataggactttgctgagaaaatgaacctataagagcaattataccatttaagatgtcctgatccaacacaacagttcatcaaggacatatgtataaaggttataaaccatattgttgatatgaattctagaataggattgcactgttatccctggggaaacttgtgttgatctaagtttgggtcagttaatgatactggtatattctgactggctaagtctaagttaaatcattccagagttttttttgtgtgtgtgctctcaggtctccccaactaaaaattattagtcattcacttttgagttattggtaactaatttccataccaattttgttgaccagaatgcagaagagtaagaggatgagtgtattggtgcaggcttgagggggccaccattggatcttggcaggaaaggaaagaatatgaagctagaggttgggtgatggtaggggaagagcagaaaatgtaacaggcatggagatcattcagggttggaaagcaggtataatggaatcaaagataggatattaaatctgaaaggccaagaaggttgagctgggaggggaaatccagtactgtgggcttacagagcaatgagttgggaaaataaagtcttcccattatttgtacacagtattatgtaatactgacttcatggtaattccaatcaatccagaatgattatttgtttatcagaaagggagaggttgctcacacacatgtttgtgtcaatattgttgcctaactgtgttctatgatacgctatatttgcccagtatgtggtatctttgagtatagatggtagtcaggctcgacaatgccacgtcaggtctcctcaggcacctgatctagtcctcctttcactagccaacagtggcaaggcctccctctaaggtacttgacctttttactctgccttttctctcctgattttctgtcacacaggtctcagcttgactatgaagttcccagggaaaaggccttccaaaagagcagcaccggcttttcacctgagacttccttcctggatagccaggtgatgactgctctgaagatggagagatacctgaagaagatccacttcctctatctcaatgtggctcccagccggtactttaggtgatagcctatgtccaggccccttctcctccccctgcctggtttccttctatgctatcttccccctcctctttctccacgtgcgcacccttctccctgtcctttctccacatactcctcctctgactctagtgtccctctctcttcccttctcctcagcctcctcctcctttccactctctacctccccttcactccctgttgcttacacagccttttgtcttacacatccttttctcacattttgctctttcttttttattctatcctagaatgatagaaacatttgttcacagccttagaagtaaattttatggtgatctattccaactccaatggaagaaacatgtgtttgtttaaatctttacagtgtcaggaaaatttttttccaggtatcttgttccttagactgaatcaaaatctgcattcttttaacttctacctcctggctctagtttatctatggggctataaaaacaggtctcctccttccccatgactcaagagacatttattcacttcctctcattagatccaaatcacacctacttttaaaaatttcttcttattattttgaagcaagggctcactctgtcacccaggctggagtgcagtggcacaatcatggctcactgcagtctcaatctctctggctcaagcaatcctctcacttcagcctcctgagtagctgggattacaggcatgaatcaccacactcggccagttttctaaaatttattttttgtagaatgaggtctcactgtgttgccaggctggtctcaaactcctgggttcaagcctcagcctgccaaattgccagaattacaggcatgagccaccatgcctggctcaaatcctcgcctattttaaaaagccctattcaagtccatctcctcccagaaataattgtaataattgcctttaaccaaactcttcaatatattaggcattgtgctaataaactcatgacatgtgttacttaatcctcatctaccaggtaggtgctattattatttctatatatgagatgagtggactgatacataagagaggttaagtaatttatccaaagctacataataaatggtgtaactaggatttaaacctaggactatcttaatccaaaagttcatgctcttaagcagtatctaatacagcctcccaaataaccttatttcctgtgcacactgatctcttgaacttaggtagcactaatgatcaatatcattcattcatttactgatcaattcatttaataaatgttcactgagagcatcctgctggttattaattgattgcctcttgattctaattctcctcctccctctctgctttgtgatactggggctgagattctgcaaactttttctcttttttcagctggccttctattaggtttgattaatggagagtgctgggagactggacagcaagataagaggggaagggacttgctgcttcgtttgcttgctctttctgccatcattgcctcagcaatggtctttcaccctggcagcagcactttctttttgtcttttttgagacagagtttcactcttgttgtccaggctggagtgtaatggcatgatctcggctcacagcaacctccacctccctggttcaagcgattctcttgcctcagcctctgaagtagctgggattacaggcatgtgtcaccacacctggctaattttgtatttttagtagagacagggtttcatcatgttggtcaggctggtcttgaactcctgacctcaagtgatccacccgcctcagcttcccaaagtgctgggattacaggcatgagccaacgtgcctggcccagccagcactgtctgaatcagcctcttcataaccctgagagataccaacaccagctggtagcccctttccttcagagttctttttgttgttgttctttttttagacagtcttgctctgttgccccagctggagtgcagtggcttgaacagagcttgctgtagcctccaccttctgggctcaagtgatcctcccacctcagcctcccatgtgactgggaccacaggtgcctacaaccatgactggctagtttttaaattttttgtagatatgggatctcactttgttgctcaagctggtctcgaactcctgggctcaagctatcctcccttctcagcctcccaaagtgctgggattacagacgtgagccattgcacccggccccattcagagttctgagtctcaactctgcaaggcccctcctccaacctcatagcttctaataacctgaacctcttccatttgttcctctagttctggagctggttttttatttttatttttattatttttttttaagatggagtctcactctgttgcctaggctggagtgccatggcgatcttggctcactttaatctccgcatctccgcctcccaggttcaagcgattctcctgccacagcctcccaagtagctttgattacaggcacttgctaatatgactggctaatttttgtatttttattagagacggggttttgccacattggccaagctgatctcgaactcctggcttcaagtgatccacccacctcagcctcccaaagtgctgggattacaggcgtgagtcaccgcgcctggcctcgacatctttttaaaaacacattctctttattaaattcactttgttgaaatgcctagtatggtttctgttttactgactggaccctgactaacacggtacttggtattatgagtggtcccaggaaactagcctctaatataggatcttctttggtttggtaatgtccttggcctaaaacagtactgaattccttgctaatgggaaataggatactagtaatccatgacacacagtggcatcacaattaattaaattatcacttgtggttgaatgtgatactgacacctagtggctgctacacttgactgtcatggctgtaatgatagtaatggtaacaatgtgggatggaatgcctacaaaccatagttgggagcttacagaaagcaaatgacaagcttagggctttaaactatcagcatcttttataattagagaagcatctcgatcaaagacagttaggcacataaagagataagaaactattgacaagagaactaaaaaggcaatggatgattacagggccaggatctgccaaagaaggaaacccattgcagtgagttcagcatttggtgctgcttttccccaaacagagggacctctcaattcctctcaatataaaggtagttaaatgtcaattttactatgcattcctgagatactgaaaagaggagccaagctttcaacagactcagggaactaaatgagcaaaagttgcagttcaggtcccataccaaaaaggaggtatatttctggttccactttactcctgtgttgtagccatttggggtctcgacccaaaggctgggggattacatttttgggttctctgatgtgttatacagatattatatttcatatattatccagtttcatatattatccagatagttggcctagtttttctagttgttatcaagtgggaatgttggtccaaatttctagtgcaccatcaatagaactctttcacttgctgtttcattatatttatttatttgccatgtaacagatttttttaatgtgtttgaatttatcaaaattttaattgcattttctccagtgtttgatttacatttaggagagaatttattccttcacctcctttattctttgagtctttgctcagctgtcactcccccacccttaccaccccatttaaaattgcacttccttctcccctggcaccgccaatctccctttgcctgttctttttcccccttcctgttgttaattacgtttatcatcttctctagtagaatgagagctccatcagggaggggtttgggtttgttgtgtttaatgatgtatcctcagggcttagaacagtctggcatagagtagatactcagtaatattcgttgaatgaatgagtgaactaattgcccagattagggacagatttggtgggggtagatattgagtttagtacagaacttgctgagtttcaggtgcaagcaagatggagtttgagatgttttggaaacagctgaatctttggttctgggactcaggaagatactgatttcccccatctactctctagtatcatgtcatactccagttgattctgagccctttgaggacaaggactatgtagaagtcatctttatgtccccatctctgaccacaatacttgaacagagggacaacttgataaacggtttaactaagttccataaagtcagggactggatttttcttgaacactgctgtatcctcagtggcttacacactgcttgccttaataagcatttgtagaatgagtgaatatcctccaaaggatattcagcaaaatgcacctatatcccacattaaatgcaatacatatggattgatataataggtgtatctagttacagtaggccagttagcataatgctatgtttagatacatttaataaagcatttatttttatttttcagttttctttatataactcagagctagcaatatttttaagcattacatatatatttggagtatattttatactccaaaggagtagtggccattgggaatgagaagagtactgtataactcctggccctacacagaaacagcagcctccattaagtaggtcataggaaaaggaaatatctcttgggaagagccagggctcagttaacataggcagctacactgtgggaagctaaatggcccactgattaaaggagggggcatgagtcaggtaactttggttttaaatcctgtattcttcccttaactgtcttgggcaaagctttaacttctctttgtttcagttttcctatctgtaatttggggatatgagtactatacttaagaaactttagtaactttgtcaaaaacaaaacaaggtttttgtatgacttgacttagtgtgtccattctggtatctatctaaaagttcttaagtcacttgcttaacaatgttttctagaaagttgagagagatgagagatagaggagagctattttatctcttagacattataggacttaggatacagcttttaaattgctaaaaatatatgtaatgcttaaaaatattgctagctctgagttatataaagaaaactgaaaaataaaaattaataaatgctttattaaatgtatctaaacatagcattatgctaactggcctactgtaactagatacacctattatatcaatctatatatattgcatttaatgtgggatataggtgcattttgctgaagtaagagaacccaagaccaactaagattttaagatggctctgaaggtacttgtctagtacattaggttgcaattttcctctttatttgcctgtttcgaattttctagtcttcctctgcttttctccaatctcagtttttccatcaaataacattctgattgtctctgcatgtctttcagtacccaagtatatgtgtattttatcatgtctagaatgaggatttttcacatttcatcatctctaaaattgtgatgcatcttacaaattgatggaatatcttattagaagcatttttatcttagcatttcataagataatgctgcagcttacggtggacagtgtcttagatctgatgggatgtaagatatctgcatttgaagatatgaacttcttggagctggctaggtgcctttttctttcttcccatctacctttggcttcggtttcttcttaataatatttgtttcatctttctagtttaaaaatcattctgctctctttgcccctttttctcctttcttctgcctgccttcctgttcccctttttcatctcctgtatcctcctttggtctcttaaagtctgaccacgttcccagggccttcactgatcagagctctttttttaaaggccttacagcctgatggtggtgccacccgacaaggtgaatcccgagcactacatcttctctccctttgggatcttgcatgtacatcctgtggaaggtagcgagacgatgacactgggtacctggcaccatcactgtgttctctggcagcagctccagttcattccattctttaagtattgcctcttacgcaagtcctttacctggtaggtaatgacggatatgtgatttggggggaaatggatgacagcaacagtatattatcactgacctctaatttctagttggaagaagaatgtgagattacaggggctgcatcgactccagaaattcctagagaatcatctgctcttggctgtgccccactttggagctgggctactccatattagcaggtgaggtattaaaaacacaacttcattgagtttttaaaaattagttttactaaaggtaatagtatgtttgttgtagaaaatctgaaagatacaaaaaagcactaagaaaaaacctttaatcctaccaaccactatgaacattttgttgcatatctttctagtcttttttctatcacatacacaaaatgtgatcataccttacatactgttaaataaccagttttttctttgaacatatattctgaactagattatattctatttcatgaatagaatatattctctatggagaatatatgcaatattctccaggtaattatatatcttaaaccacttgcactcacgtaattatgtgtaatgtcagatctgggggtctaattcagttgtttgaatccaaactctgtgttctttccaagatattacttggattctatttttcttttttttggaaaaggttggttattcctattttcagtatttccttgctttccctacatgactcctcagctactcttaggtatattctgtgacaggagttgcaaattcagttgcctaaagggcctaagcaggaagtattgaaggaatgcagtggtttaggtggaagacattagggagcatgggaactgcaatctggagactgcatctaaagaggatagtcactactcagttccaactaattactaattgttgctgtttgggaatataggtccagtgtgatcagctaccttacatttcaggatttcctagaaatccacattttgttatgaaatttctcacttttaactcaaatttcaaccaaattttaactcaaaagaatttttttttttttaaatggagtttcactcttgtcgcccaggctggagtacaatggcgcgatttcggctcactgcaacctcctcctcctgggttcaagcaattctcctgcctcagcctcctgagtagctgggattacaggcatgcaccaccacacccggctaattttttttatttttagtagagataaggtttcgccatgttggccaggctggtcttgaactcctgacctcaggtgatccacccacctcgacctcccaaagtgctgggattacaggcgtgagccaccacaccagaccttcaaatttttattaaaacactgtatgctagccaactcttagtgactcattttgaaaaacttttccatctgaatttaacccagtttgtaacttctgctctagggagtttcatcctccagtctggcctaatcatcatggtgtaattaagagcataagggcttgggagacgggacaaatcttatttagaccttgagtactagcaagggactttagtatttgagcctcagtttcctgatcttcaaactcggataaagatttctagatttaattctgtaatgagaattaaacgacactgtgaatacaaagtgccacattcagtacctctcagtagacactgaataaatgatgcccattgtgaccatcctgtctgattattaggagtctttatccttttcaaggatgtttacagttgtggagttctctggggcttgggaggtatggataacaggattgggcttcctcagggatgggcagcccacagagaagttccagtttcatcacatttgatcctaaaacttacctgtccacctagacttttaggacctttagctttctctattccaaggaagaagcctctgctgtctctccttctaagtcagaccttggtatctatttgaccctctcttctagcagagagatcactaggtataagcacttgcacataccccaagccttttctcagcttgtatagctgagaaagcagctttatgggcttatactctttcagagaactctcgagagggagctgtcactattggtcactgttggtaatattacaatctctataaatatttgtgcagtctgaggtaagctaggctgagaagaggtcaaaggtatccaaggaaggattgggatgccagctctgaccagcttagtccttgattctaggcttctgcaggagctacactctgtgtcctggctaccccaggaactggatcggtgctatgagctgctggacctgcagacggctctagccgaggagaagcataaggctctacggctgctccatcgttgcctaaacctctgcacatccattcttcgactggtaagaggctcttagtttattgtggacctcttccccaagttgagctccccagagtttcagcctcctcttagttaagtttctcctggaatccactgtatgacctggactctacagttgaatcagagccattttcctgcccagcaacagcagtttctgctctaggatggatgaatcaataacaggtgtgcagaggcttgaactagacctttccctaagggttgatcttgacctaggagcagggaggagaaggaatgtatcaatgtctattttgtctgttgtttatgctgacctttgggaattagggaatttgagaacaggaatcctggtcttttatgctgctgagcttatttttgaacctatcttgaacctttggaaggccactgtagttagtggaaggatgcaatgatggagtccttcttaattatgcatatgttgcatctgtgatgcacaacccctgcctagagttctgggaggccctcctgtgtactgacctcttgcccatggtctattatcatggtttgttgtcaggtggggctggatattcacacaggactgtggctaattaccatgtgtagatagtccggttctgagagaggaggcccactcagattttgtgaaaataactaattaatgtgaaggaggcataccttgcctggcttgagccaggttttgggttctacatgttgctctaaactccatcagaggaggttaatcacaaaggacagaactctgaagtctcaaaaatggcctcaactgcaaggaatttcttttctttttctttctttttttttttttttttttttttttttgagacggagtctcgctctgtcacccaggctggagtgcagtggcgggatctcggctcactgcaagctctgccttccgggttcacgccattctcctgcctcagcctcccaagtagctgggactacaggcacccaccaccatgcccggctaattttttttgtatttttagtagagatggggtttcactgtgttagccaggatggtcttgatctcctgaccttgtgatccgcccacctcggcctcccaaagtgctgggattacaggtgtgaaccaccgcgcctggccgactgcaaggaatttctgttcctaggaggaaccaataacttctgttgattgctctggttgaaatcttaaatatttaaaaatacccgtaataaaacattttcataaaattttaaatagtcaaattccttccccttctaagaattacctgtcctctttatcctactctgttttcctttttctgtcttccttctcacctttaaaaatactatataagttacttactatttttactaatgtctcatgataggttgtaacctccacaagggtagagatctttgttttgttcactgatgtatcccaggaacctagggatattattgaacgtctttacacaaagagcctctgcatttttacgactttgcactgattggactcttcagtgatatcttctttggatgttttagaagagtggctaaaaaaggaaattcatagtctctctttaggaggtttagaggaaaggggccaaaggcattagcaatgtcaagatcctaaagccaaggtgcaggagtgaaaaggaggcagtggcctttagcttccagacaataaatgctggacctgccattgtaccaagctgaatgaggcaggagatgggggtgagctgctccacagcctttctctacctctcagttcctcaatcccacctttaatgttataaaaatagttataactttttgaaattcagtagtcaattttgtatattaaggtataattcatatacagtagacaaattttaactgtaaagttgttgaattttttgcatttgtatttgtattgctatatatttgtatacctggatcacgatagagaacatttccagcaccccagcaagctccctggtgcctctttcattgatacccccgcagaggtaaccagtactctgacctgtgtcaccacaggttaattttgtctcattttgaatttcatgtaactagaattggacagtgtgtgctcctctttgcctgacttttttcactcaacattatgtttgtgagatttatccgtaatgttctaggtagcagtggtttactctttttgtatagctacgtagtatttcactgtatgaatgaccacaatttatatattcattcttctattgtggacatttgggttggttccagttttttactattatgaataacactgctgtgaacattcttgtacatgtcttttggtggacataagcatttatttttttgggatatatatgccaggagtggaactgctagaatagaatatatgtatgttttatactgccaaacagttttccagagtggttgtaccagtttacgtttccatcagtgatgctgatttccagctgcctttcattcttttttttttttgagacggagtctcattctgtcgcccaggctggaatgcaatggtgcaatcttggctcactgcaagctctgcctcccgggttcacaccattctcctgcctcagcctcccaagtagctgggactacaggcacctgccaccacgcccgactaatttttttttgtatttttagtagagacggggtttcatcatgttagccaggatggtctcaatctcctgacctcatgatccacctgcctcagcctcccgaagtactgggattacaggtgtgagtctggctgtgtctcccaggctggagtgcagtggtgtgatctcagctcactgcaacctccacctcctgtgttcaagtgattctcctgcatcagcctcccaagtaactgggattacaggtgtgagccacaacacccagctaatttttatatttttagtggagacagggtttcaccatcttggccaggctggtcttgaactcctgatctcaagtgattcatctgccttggcttcccaaagtgctaggattacaggtgtgagccactgcacctggcctcagttgcctttcattctcaccaacacttattttttttcttttccctccctctctctctcctctccctcctttcctttcctttcctttcctttctccctccttccctcccttctttcctcccttcctccctttttctctccctccctctcttcctccctccctccctctcttccttccttccttctgtgattttgtattttgatataatttcaaacttattagaattgtaaagatagtaagataaactctcacataccctttatatagattgttatttttcccatttcctttatcatttatgctctttttttataaacatgtatacattattttctaaataatttgagagtcaattgaaggcatcagcccccttacccctgtcttagtttgttttctgttgctataatagaataccaaagactgggtaatttataaagaataaaagtttatttggttcatggttctggaggctgggaagtccaagagcatctggcgagagtctcatcccatggtggagggtatcacatactgatgagacatgaatatgagacagagagaggagagaggaaatcaggcaaaactcatcctttttatcaggaatccattcccatgataactaacccactcccatgatcagaacattgatcccttcatgtgagttaagccctcttagctcattgatcccttcatgtgggttgagccctcttaaagaccccatctcttaaaactgttactatggcaattaagtttccaacacattaacttttgggagacacattcaaatcattcaaatcatagcaactcctgtatatgtcagtatgttttttctgtgaatgaggacatttcattttataactatagtacaatgatcaaagattaggaaatttcactctgatacaactctgttatctaatctccaatctttattcaaaatttggcaattgttctaataatgtcctttattactatattttttcgttcttcaggatccaaaccagaattatgtattgaatttagtgctcacttctgtttagtctctcttatatggaacagttcctcagcctttgtgttttccttacttgcttcaaggcatgacaactctgtaatacgattggaacattccaagcctccttccccactccagatgagaccaaaaatagaatttagctgagatcttgctgggtactttccccttctcttttctgcttttttttttactcctgtagaggctcttgtttccctgaagatcattccttcaataaatcacatttctcccaatccctgtctcagggtctgcttctggggaactcaacctaaaagaatatgtattaggccaagctcattcactgttttattcaaatattctatagacacatttttttttttttttttttttttgagtcagggactcactctgtcacccaggctggagtgcagtggcatgattttggcttactgcaacctccacccccttgggctcaagccatcctctcacctcagcctcttgagtaactgggactacagacatgggccaccgtacctggctaatgtttgtatttcttttatagaggcagggttttaccatgttgtccaggctggtctcgaactccaagctcaagtgatcctcccacctcgccctcccaaagtgctgggattataggcatgagccaccacacccagccaagacacaataattttttaacctccattgtctttcagtttctgagaggtatatgttaaatatcccttcctacctacaactatagatttgttcatttctgcttgctgttctttcagtttttgcaacatgtattttaaaatcatattttaaactcattttaaaatacatgttttcactctcttttgttttgtcatagtactctaatcactttttttttttttttttgagatggagtttcattcttgtcgcctaggctggagtgtagtggcgcaatcttggttggctcactgcaacctctgcctccagggttcaagtgattctcctacctcagcctcccgagtagctaggattacaggtgcccaccaccacgcctggctaatttttgtatttttagtagacatagggtttcgcctcattggccaggctggtctcaaacccctgacctcacgtgatccgcccacctcagcctcccaaagtgctgggattacaagtgttagccacctcgccccaccagtactaaccacctttttatgtacaccataaattatgtatttattatgtttgctgtctctctccctcctcctggaggggcaatgacttgagcactcattcactaatatatctctagtgcttactgtagggtatgccatttagtaggtgctcagtaatttttgttgagtgaatgaatgacaagtatgaatttttaaccatatcgttctcccaagcagaataagaaccttagcattatcatactttcctttcccttctctcttcctccctctattcttcccattactcttatattggtatctcctggaatcttcttcaagattgttatgaacattcttgttttataacctactcctttgtcttagtccactcaggcctctataacaaaataccataatctgggtggcttacaaacaacaaacatttattcttggaagctaggaagtccaacatcaaggtgatgacagattcagactctggcaagggctcagtcctcataggtggcaccttctcaccacagaagggactagccagctctctggggccttttaaaaataaaattgacaaataaaaatggaatatattcaaggtgtacaatgtgatgacttgatagatgtatacattgtgtaatgattaccacagtcaaattaattaacacatccatcaccacacaggctgtacattagattcccagaacttgttcatcttataactaaaagtttgaaccctttgaatagaactgtcatatgatccagcaatcccacttctgtgtatatacccaaaggaaatgaaatcagtatctcaaagagatatctatacccccatttttattgcaggattattcacaatagccaagatatagaaacatcgatgtgtccatcaatggatgaatgattaaagaaattgtgatattaatacatatatacaatgaaatattattcagtcacaaaaagaaggaaataatgccattagtgacaacacgtatgaacctggggacattatgctaagtgaaataagccagacaaggaaagacaaatactgtatgatctaggacttcttttttttttttttttttttttttttttttttttaagggcactaatcctattcctgagactggagacctcatgatctaatcacctccccaaagactccacctcataataccgtcaccttatgggttcagatttcaaaatatgaattttggagggacacaaacacacaggccatagcactacttaaaattaacaatatgtctcacaaatttctttgcccatcaaatcttttgtagaatactttatcctcttggattcattttcctctgcatggaatatattaatactattcctaattgttttaagggagaatctgtggatggaaaattttctgagtctttgtatatctaaaaatgtttttatttatcctcaaactttaatgatattctggctaggtatagaattccaagttttttattgttatcattacttttgagacagaatctcactctgttgcccatgcagtggcatgatcagggatcactgcagcctcaacttcccgggctcaggtgatcctcccacctcagcctcccgagtagctgggactacagcagttgataccgccacgcctggctaattttttgtattttttgcagagatcgggtttcaccatgttgcccaggctggtctcaaacttctggacttaagtgatccaccctccttggtcttccaaagtgctgggattacaagcatgagccactgtgcccatcctaaacatttttttcacataatttggctgttatcacccctagtattggtgctttaaaaatgtatactgattacgttctatggtattagcaattattattgttgtcgttggtatggttttatcctaatggcactcagtaggctctttcaatgtgagattatacattctttttacaaacatttactgtggaactaccccatgccaggcactgtgtcaagcaatagaaaaatgaaataaggtgtaacagagatcgcctcctaaaggagcttacagtgtagtggatgagttatataaataacaaaatgatggtgcattggactaagggttatgaagtgggaagcactgggtattagggagtattgttagaacatggaagaaaacatctcacttagtctcatatacaaaatcatcttatgcatagggcatgtttgtatatgatgtcccgtgcttaggacttaactgtcttatgcttgggtctgagaagactggggcttgagctcatggataccagaagtacaattcacagaaccaatcagttctaatcacaagctctagggagcatcaaaaggaacaggaaagcagggaagacaaaggatccatctggccaagcatagctttctggtacctcttctctgttcctcaacagtaaaagcccagagcattggcaattgtcagcagcctttataggctgaggaacctcccagatctgaaagaactcacaaaaaggctcccaggcttttattccacattccctctcctctaatagaaagtctatatcagtgcccagaaacagcttctattataacataaaccaatatcattctactcagcaggccacatcacctagcctaattattatccagagtccatatcctgaaattattgtttagccttatttatcccatctttttctttttgtctcttctgtgcattgtgaacctctatatttacatatacacaaattttctgagttccaccctgggggttttcagtagacaggcctggcctaccacattagcacactgtgacctctcaatatatgttctctatttcacatcttctctggtcaaataaaatttgagggggtggggtagggtaaactctactaaaaaggagccctccatatgtatatctaggttctaggtcccagactccaagacctgagagtttgcacagactagtgggtggctggtttgctctccatccccctatctggtgagtttccactctatgctcacaggttcacgaggacacataccacatgcaacagtgcctacaggagcgagtacaaaactgtgacaggatcaggacaggccaaggctccatataccttcagagggtacagcacaagcaactggagcagaagctgaagcaagcagaggcctggtggctgcagctgggaaagtttgcccgcctggttgactacatgatttgtcagagcctcatttctgtcttggaagagcagataacctcttttgtggccaacatccttcaagtgaggtggtgggtggcatgtgtggaggtggcaggcagtccagggccagatgctgaggaatgtatactgacatctagcccctcgacctttcctgacccttttttttacaggccccaaggcagaaaccctttctctcatcacagctggtctttgatgatcatggtcaactgtctcatgtgccctgtgttgaaaatatgatccagactctaactggaggcctacagtctgtcaagacctctgccttgcaggtattctgaattgggcagagagctggctgtgggaattcccagttcctatcctctgagtaatcagaagctcacaacctggtttgaatccctcattgctttcccatttctgccccttctccatatcctggcatgaaggtagtgcagtctgcagacctgaagacctcctcggattccctgtattctgaaggtatttagggagacctaggcagggggtaggaaggctgaaggagggaaagggcacaagtactaatggcatgggaagaaggcaggaggtccaggctatagagtcaggcactgggtgtggatggagcagctctaacctgggtactgcacatatgtgttgtgggtagaaaggtcagggaatgtttttgctcacaaattcacgtggttatgtgtatgtgcgtgcaatgagagggtgtatgaaagagtgtgagtacattgtccttccaaacctgattcatcccaaactctgtgaggtttttctccagtgccataattgcatttcatttactactgaattttattgctaagtaaatttgtacttgtttgaagagctctgcttgctcaacacttgctttatgtcatatagctctttttcatttcatatggattaattcattgtattgaaatattttatggttaccaattattattggttatcagtcttcacacttattaaccatcagcgtggaaacacatcttcacatttcccttatttaggatactaatgctgtcacaaataaaatcattaaatgcaatcagtcacatctgactcgtccatactttttaatttcctcattcaacttctatctgttcattaagaagatttaaagacataacgttaattttagggaataggtgacaaggagcaaaaaggttcactgaaaggaacctgtgtcttttacaaattatacaccagttggggcacattgttttctccaaataaatttaggttaattgatagagactattgatatttgttttacatggtgctgtggaaagaagaaaggctctggagtcagactcattagtttactagtctgcaaagtgggaataacaaacatacctaacctgaagaattattttaaagattaaaagagataatatgtctagtatggtgctcagcacatagaaatacatgctacagatgtgccttcttactattattagtattaaatatgtagataaatcagacatttcacagcattttctcattatatgtggtactaattcatgttataaatatgctgtagtattttttgaatggttaaaaggagcaaaaaacaacctcttgcatttttattctaaattctagtgaagctgaaaatattcacctaccatgtcttaggttgtcccttctacttttaaaaaagcacacggattggtatgtttaggggtgaaatgtcataatgcttgtatcttaccttcaaaatgtttaggggaatgaaaagatagaaggaaaaacaaataatgcaatgtgacaaaatgttaataattgttgaatctaagtagatggataagggtattcatagtaccattctttaaacttttctacaaaatttgaagaaaaaaaggatctgaatggaaaatcagattcatataattgagtaatcaaaaccaaagttctttttgttgtttgtttgttttcaagacagggtctcactctgtcatccaggctgaagtgtggtagtgcagcctcaacctcctgggctcaagtgatcttttcgcctcagcctcccaagtagctggaactgcaggaacataccaccatgcctggctaatttttaaattttttgtagagatggggtcttgctatgttgccgaggctggtcgtgaactcctatcatcaagcaatcctcctatcttggccttgcaaagtgctgggattacaggcatgagccactgtgcctagccagaactgaagttctgttgtccttaaattctttaaaaaaattaaaaagttttgatttgcatttctctaatgatccatgatattgagcttttgttcatatgcttgttggccgcatgtatgtcttcttttgaaaagtgtctgttcgtgtcctttgcccactttttaatggggctgttttttttttcttgtaagtttgtttaagttccttatagatgctagatatcagacctttgccagatgcatagtttgcaaatattttctccccttctgtaggttgtctgtttactctgttgatagtttcttttgctgtgcagaagctcttacgtttaactggatcccatttgtcaatttttgcttttgttgtgactgtttttctcacttataagtgggagctaaatgatgagaactcatggacacaaagaggggaacaacagacactggagcctacttaagggtggagggtgagaggaaggagaggaacagaaaaaaacaactattgggtactaggattagtaccgtgatgaaataatctgtacaaaaaactcctgtgataggagtttacctatataacaaacctgcacatgtaccccggaatctaaaataaaagtttaaaaaatggaataaattttgaatacaggtaaataagtagcagttaaaacactaatagtagtctttaagaaacatacatccaactgagaaaactgttacttaaatgaggcaaaatttgtatggccttttaactaaattacaaaataatttcaatagccccacttacacacaaaagtatgaaaattaaccccttttcaatagaaatgtatacattgactagattctaatcactaaaagaatactcaggatattattaataaaatagttgcaacatattctccagtcttaaacggcgttctccaatattttccagagaacattttacaactaaacaagagagtattactgttactatttgatgtccttacaattttatcggaagttttctgcagttcaaaactcagaaagcacgatcagctaatcacttttctcatctgtcaggtgtcagattcaaaaaccttaaactttagtatggcaatatcctaccaagattggaataactttttgatatttgtggtaagataaatctgttacactgaaaagagacaaaggattgcctaattttaattatataatctcttgatgtacgttttggttgggatgcctgaaattagcttggagatacaatgcaaaaatatgaaaactgtgatttttgcaaggggactgcacagggaaggtctctttggagtatgaggtatgagcagtaggactaggaagaggaagtatagagggaagcagtgtgactgtgagtagatttatagatgagagagaaggaaagatttttttttccttgccgctctgtgagaaagcaaccttggaggtatgaggagtcatataaatatgtttaacaagaagctttgctctgtgtggaatgtctgagtcactcattcaaggaaacctatagtaaagatctgtatcattgaagcctttcaagttggattgatattttaaaattcaactccatgttgactcatatgtattatatcaatacatataaattttcaattgaagccccaaatcccttagaaatggcaggtaaattacattcctttgatttagttgatttcaaatttcttcttatggccaggcacagtggctcacacctgtaatcccagcactttgggaggccaaagtgggagagttacttgaggccaggagtttgaggccagtgtgagcaacatagtgagaccctgtctctacaaaaaaatttacaaatcagccaggcatggtagtgtgcacctgtagtctcagctactcaggaggctgaggtggaaggattgcttgatctcaggagtttgaggctgcagtgaggcatgatcacaccactgcattccagcctgggtgacagagataccaaatctaaaatttaaaaaaaattttctcattataagcaaagtttatttcattcttaccttggctatgaagttagtgatttttgttttgttttgttggtatgttcttttaccaaattccattaaaaatagactagcttttctttccattgcttggaatcacaattgactttgtatagcaccatattgcctgagcactctcataggtcttggcacctagaatcactgctcttcaagcttgtcttatattttggagctcacaaaacagacaattactaacttcaaaggtagagaagaagtaacagcacccatcttcacagaatttgaaagtagaatatcaggaagagaacccctgtctctcaaatttctgcttatcccttttttcatctcttctctctgtgtatctttccagttcctctgccctgattcctgagtccagttatctctccttcctttggactttctgttcccttataactacttctttcaaataacttaaactttttatgacaccgactccatccttgactttatatgatatttgagttttcctgtccgtgagactgatttagttcaaacttcaagacaaggagtatgattgattcagcttctcctgtagattgcatgctttattcataagctatggcaaggggatgtgtcatggtgcaaaataactggcttttagctataggcaagggtagatcctcttagaaggctgtgtatggtgggggaggttgcagtcttcagctatgcttgtgtttggctataaacgtctattatatgggcctgagtatgggggttgattttggattaagtaatcttaactcaaaactacgtacgcacctataactaaaaaattcatgatgcagctagattcagctgcagtggcctaaacaaaataaaacaaaacaaaacaagaagtcttgaagtaggtgcttccagagtttgttctgtggctcaaaagtggtcatcaagtaccaggttctttgtatctttccatcactctttcctgcttttagctatatttaagagcagattctgtaagagagttatgtgtggcggaggaggccacaataaagtggttttcattttttttgttttttcattctcaggcttgttgcctcatagttgcaagacaagctgcaatgtcaagcatcccattctcaagcaaaatcaggcagaaaaggagaggcaaggttaacaagagagctctgtgtctgactctcactttttgccaggaaaaggaatcttttccggaaactccccatcagactcacttttacatctcaccatcaaaatctgcgtcatctgtctacctctagctgtaagataggctaggaaatcaaatggctgacgttctcagtgtctcatgggagatggttctacaacaatagaggaagggagaagggaatagctattgagtaatcaaccaatgtaccttcagagttccattcttcaggtaggctctgtccacctggcaagcaagataatcaccagcattctctacatcgtcatttcatactatactctttcccttctatccctcacttaatcttagttctgtaagtaacaatatctttaagcccactagcagcccttgtgttgatgtctttctagtaattttgtttgtctgaaggtcactttttactaaattcctcaggaagggcttgtagggacaaaattctgaagttcttctatgttgataacaatttgtaccttttgaaagttagtgttgctggatataaagttgttggtttatacttttttcctttgtgtatcttaaatatgttactatgttttcttaggacattatgagttgctatcaaaaagccttcgatagtctaattttatttgctttacaaaatcacttgttctttttgcctagattttttttcttttttattgaaatctagttatttttgttagaatatgtgttggtattgaacattctggggaaggattgtcaggtatgttctttcaaaatgtggctttatatctttttttaaatttcagaacaatttttctgaattacggtttttaatatttgttctcttcccttgctttgtttttttcttgggggaatcttgttactgatacattagatccttatcacccatccccaatatttttccctttctcttgaaatctttaaaattgtttatttcctttttagttgtataattacccttattttgccttctatttttcttgagaaattatctgtcgagtttgtttgctcttatgtcccattttagttaaatttccattatgaaattgttttttctttcatttataattctttccatagttctgtcacataatttctgagtttttctaattctgatatgtgtcctctcatgacttctatcatttttctattgtcttttagcttgttttgaaataggctatagttttgctctggtttttgacatgctttcattgtctctggggatttattctatgcctcgctttgtttttttcttataaaagcttggtatggggtttgatgctgatacttttctactgctcatagaaaactggaaattttagcttttcttaactttcaaaagaagacttggttcaaaatagttctctaacctctaagtttcactttctattgtttttctgtattaaaaaaagatggcttactttctgaggttttctggtttccctcccctaccttcatctagacttttcctttttctctattgctgctcaatccttattctactcccagcattttctccatgacgagctctgtcccaaaagggagccctgactgtttggtttcaagagtacacagggcatagattacttaagcttctatagaccttacctcacctgttcttggagggggtaagacccccttccagttttacctgctgttctgaaatgggccctctgcctcccagtaaatgcttgatgactgtttgggggttttcttattcttaggtccatctgttgcttcattgtttccctctgcatcattcatcacaaatggtgatgccatgtgtgttttgaggttgcagatggtttgaccccacctacttgtattttaggatctgtgaggatcccttgccctcatttgttaaaaaatgctatccttgtgtttttggttttattatctaattgttctgtcatttttacgtgggcatttgggggagatttcaaaatgatgctgccattgccatcatcttctcagaatcccttctggcattttttttaaaggatgattctttttcttatatggagcagagactgtaaagtataggaggcaagggccaatgcaggtagaaaagttagaaggcttttgcaataatgcagtaagagatgatggtgacttgggctgggggaggagggcaggtggtggtcaatgtggtgagaattggtggattctggatatatttttaaagtaacgacaacaggatttttaaatgggatgtgttgtatgtgaaaaagagtcaaaggtgactataaagattttgactggagaaactggaagaacagagtttccatttactgaagttggaagactgcagttttggcggggaggaattagagttcattttggctctgttaaatttgaggtgcatgttagacatccagatagagaagtgaattaggcagttctttaaatgggattggagttaagtgagagatctgggctacagataaatctgggagcaaatatatggtacttacagccataaagctggatgagatttcctagagagtgagtacagttggagaagagaagagatcagctaggagtactacagggtttgggtgtggatagtatggctcttattctgaacattttaattctttcctttattttgtgcgaagttttaacacaaatactaaacttgtcaattaaccagttcctaaagagttaatgagtggctaggttcaagaatattctctaagacagataactgaggactggcatgttcaatattcattcccagcaactcctctgttctgcagatgccagagactacaaactacacttcccagactcgcctgcagctaggtgtcatatacaatttaggatccaccagttagatctacaaaagactttgattcagaattgaattaagagggggaaagagtcagggcgtatgccatccgttctgtggatcatagcagaggcagtgtgttctgtagttgatggtgtgacagtgatatcccattttgccaggcagaacacagccctagatgctcaaccttgagtggttttgtattttagctctcctattattctgcaacccatttaatattctgtaataagtccctccctgcttagactagctagagtaaattatgttatttgcacatgaaccctaactaataaatcccctccatgggtctagtattttacgtttgtgatatagatgtatgtgttaactcactcatgagcagcgaatgggtgtgtgtgtgtgtgtgtgtgtgtgtgtgtgtacacacactgagggcaaggagaaaggaagattgtttgtgggctctggagggtactcacggacaattatggcctgtgctccactagaagaagatgaagaggaggactcaaaagacgaatttctgatgcccaagttccagggccagcccagcgatgctgtgagcatcttctgtggcccgaatgtgggattggtgtggccctggaagtctcacccaattgctggtatcttggaggtccgtggatgtcggctgcggggccaatacttcccccacaattataagcagctggaggaagacctggacaacaaccctaagatccagcaggcactgaatatacaacaggtgctgctggaggtgagaacagtggtttaagggatagggcgctgcccaccaattcccattatagccgcatgcctctgccctaaacaccttgtctgcccttagggcgtgctgtgcaaggtgcaggaattctgcagggaacatcattggataacaggcatttatgaattcctgcaatcctgggggcctcagaagctggaagacatgagaggtggtcccatcaagaactacgtgacgctggtgagccgcctgaatgtttggcaggcccgtgtctccagtatgcctatcgagttgctcacaaaaggcgggttgctgctacttagctgccatgatgtacaggcagagatgggtgagtactgcttctcttccctctcctccttcccttttctgtatgtctattcacatggcctgccttggtcctggaatgtcctccggagaccttcggtgcaggcctcttattggacctatgaagccttccaaagcccgaggtcccaggccctttcctttgccatcaaagctatgctcactgcaaaggccggcctctctgttttggctctgctcataccctgtattccttaggaatcatgttcctgtgcttgggctactaagctcagtgtctttacagagattcttgggaatctagggtgctttctctctgcatgtagctgagtgaaatttatactacgatttgcatatgtaaaaagctactctctaactgagcttgtcttactctgtagtcctaacttctactggtagtgaaagaatgtaacctttccaattaaagaaagctcctttcatttaaagcagtcacttttggtctgattcagtctatttgggatatctgggcaattgaaaatttatactgtagttctgggttgtttttactttcaaatgtcttttcctcccttttccttcccaaggtgccacctgtactggggaaggccggtgggctggcttctgaggtgtgatacatccttgcctggtctctgccctcctgacattgctgcttctggtgctgctgtgtcctgggctggtagagctgcgatgtgttttcttggactaatagggacctggagtgtctgtctttgctgacctgtccttgtcttaacatttgctggcatagctgatccttggggttttagtgaatccttcatccagtctctgtcttaggctggctacccccatggcttttgcttcagggtccctagcccctcaacacaggaacttcatctaggccactggctatcaattctctgctatcatctatatcccctgccatttgggagttgtgggaaactggtaagcattatatccgcccctctttttactacaacacataacagtatgatttctactctgctgtgactgtttcatgttagcaagggacaccctaaaaggtggtctttcccaaagttctatgtggaaagtggggctcaagaccattctactacctattttctcctcaacccatctcaggttccctcctcttgccacttctacccctgctaattgaacgcccaattgttgctatccctgggtctctgagaaatctggcttatgacctagtcttttaccctcttttctttcttccttcccatgggaaggatatctcatgctattgtgtactagctagtgcctcagcctaggagttcgccacagagaggctcacagcggggtagatttggaagccagtgatttgttcttttaggaaatatggaggttgttctctttcctcacctagcctcaaggatggcaatagccaatagtatctacttcctgtgaagactagatcctgttggacccgtggcttcccaggcctgctttctttatgaaggttagaagccactggggcctggaaagagtttgcttgtatgccctgcttgcttcgccttccctgtcttggctctcaacagatgaaagcacatgtatcattaggtatccagtgggccactaaaactccctcctcttgtacagggggttcaggcgggcaaggcaggaaccgggaggacgtttgattgttttgtcttctctctggccgtgttttggtcaggctttacttcactgctgctgagaaagcttattgttgttctagtttgttagcttcctgatcctcaatccaggaccaactagtctctttaagaggagcaggtggagagaaatgagcactggatttagaaccctgtctgtttttcacttgctttgtaacttcagattactgtgttttagtttctttatttgtaagctgggcatgataacacagtcactcacagggttatagtaaggatgactaagatattatttgcaatactcttagcattgagtgtggcatgcagtaggtgcttaatatttttttcatttcaccttatccccttgtatctactctcatccttcttgctgatctaattttatctaaccctctgacttaactctgtcgtttctcttcttcctgaactcccttgaacaacaaatggcgtaattatacactctgacgaattagcttcaccagaaacttggggtcaccctttactcctccctctccttgaccttactacatccaacctgtctccaaatccttgtcattcttctgccccctaagtatctcttaaatctgtttttatccatctccagcttctaatcccaaggagtcctggtattttatcaatgcattgctcctttataccatacggtgtcactgttgagctcccatctgccttcatctgcctgttgctactggtccaaaagcagcaccataaacaaacaaacaaacaaacaagcaaacaaatgtggcagcattgcaatggcctagttactgttatgttccaaagggacagtgtgaaaaaggatgagtttagatcttcatgttctgtttgatataggttgtccctcaataggcttcctctcagcaggttttcttattatcaggtcttagtacccagtcatcttggttacttcctccaagtctctgaaagtgacatacccagtatgtctcaattatctgtcccccaaactcactattttacttactagttgcagagatgctaatagaggatcggtcagtttactttgcacataacataaaaaatatttttaaatactttttataaacatatatttttatgtttacatttatatttataacataaacatgtttatatttaaaatataatgaagtggagccatgctgcctgagtctgaatccttgctctgccactgtgtgatgttgatcaagtgacataacctctctgagcttcagtttgcttatctgtaaaataatagtatttacttcaaagggaatttgtgaggataaaatataattaaagtacttgaaatagtgtctggtatgtagaaagcactctatactctatttggtgtaccatatttctatattgtatttttcctattctgtgcatattttaacatctctgaactttaaaggtgtctcatgattgaagatgtgttagagtttagatggcatcagttttttttctttgttagtggtatataaaataatggtgcttcttacaacgggatcttagattttatgaggtatcatatgggtgttatccctgccctctgagataataaagttgttcatactgccaagggcagcttccaggattactttctagccccttatccacctgagactttctttactttaatccttaaaaacaaaaggcagatcatactaccttcttggtccccttcttctagagcaagggcagtaagactccaaaaccagaatacttttatgtctgctaggatactctgctattcacaaacatgtcatttccatactgttgcacacactgtttcatctttttggagaattaatactcaacacatccaactccagtgttcccttctctgaaggggccttgcccagccttctcaggataccccccggcacccccacctcttagctatactggctgaaggctccaggcactcacagtggatttatcacactgatttgtgattgctcatttgtatgtctgtctctgcctcatattgtgagcttttcagggtggggaaactttctgtctcattcatttgctctcgtctaccagtatagagcacagtccccagtgcatagcagctgactggacattgagcagggattcaacaagcattaaatgagataattcatggtctgacctgccattcagcctactcccactctggaccacagcactgtccccagcaccccttcttttttatgcgtcccctcacaccttactctcctgtctccagaatccaagctgaacagcataaggaaggacattcttgcacacgtgcaaaatgagtgctggaacctcagtcaacaactcatgacagagctcacagatttcatgcatatcttccgaaccatcaactcagatattcatgccattgcacagtgcacccagaaggtgggctctccccatccatccttcccagtttattcagggcccatcctgctcaaaagctcagcacactctcttcaggtctctgctgagcccccagcagagcttgatgctcttaaactgtgctcgcctaagagatctacccttgctaattcttaccctgtccatgtggccctcaggttcctcatgtcacagggaggccctggtgtgatgagagagttgtgctctctgtgacagtcagatagaaaattgttgccttgtcatcaaggtaatggggtggtgggtgagaagtggacccttcaccagagagatctgggtcagagagagatttgatccctctggagagatccctcaggagagattgcccctgattccagttgattacaaggctgcaactgggtctggagacttcactccaaaaggtgggagttccccttggggatgggaccaaagaggtacatggggttgtggggctgccggtctcatgctgtaattcctgcagttgaatgaagccaatgaacagtacgtcgagctggaggagcgaatggaatacgtacgggcactccacgaactcatccgcaaccactttagcctctttagtgctgagaatgaagcactggacatctcggtgagaaggcaattcggggagtcacccatccctccctgccctcctcccccacaaccacatctactccactgccctctgcttgccccacagcttctggatatgtgggaggcatttcagtttgagaaaagccaggcttcagagttcctgctcagcaagcgacatgccattatgcccaagctgcagcagctgatggcagcagcattggcagagctggaaggcctgcttgcgaaggccctctccggtccctttatggaccccacacaagatcagaggagtactgagcaccagctcgtctccctagagcgtcagttccagaacacagtcagcgacctcagtgaactgcaccacgcctatgccatcttcactggtactgaggatccctgcaccctccattatcactctgtgatagacccttcaactgaagtaagagttggaactcagggttctgtgtcctgtatgaccccaagcaagccttgggaatcacacaccttcactggtgtcttttataaatgaaaatttcaggacaaaaacatcatatattgaccatggcaggtgttgtgcttagggtgggggtatgggggctcacagtctggtaaggaaggcaaacaagtgaatgttccatcagaatgtgatggggtcaggggctaaaagcatgtgtgggagaaatgtaagttctccttatagaacgtagcctttttgtagccctgttcaacacagtcctacaccaggcagcaggccccgaacaagagtaggtcttgatgctctagcagatcacttcctccagccagtgtggtatagagaggaggctactgagggcctcactaatacacaggaggaggccaggacagaactattggtctcaattctttcatacagtggtgcaggtaagctggttcccttctgttcttaaagaactctgtgggctctggaaggagaccagagcaaatataagagccattaccaaacaatggagacaggatctcaggctagagtgcagtgtcatgatcacagctcactgcagcctcagcctcccaggctcaagcaatcctcccatctcagcctcctgagtagctgggactacaggtgtgtgccaccatgcctggctaatttttgtattttttgtagagatgaggactcactttgttgctcaggctggtcttgaactcctggactcaggcagtccttctgccacagcctcccaaagcactgggattacaggtgtaagccactgcgcctggccttccttccagaattcttatatgtatgttggatttactgaatctctctcactcattgcttttatcttctttatcatcagtcattcctttattctttttctctgagttctggaaaaatgttgtgagcttgttttataagcttccatttcctatggtatcactttgtatttctattgcattttaaaacacacattttgcatgtgtatgcatgcttatgtacacatgtatacgcatgtaactgtgtgtttatgtgtatatacatgtgcacacatttgctatctctatctgctgaagaggacatgaagcaaagaaaccccagtagcaagaagccacattgtgctcaggtcttagtttctaacaaacaccattccccattaaaaggaaccagagctccttagagaaatggatgattccagggctgtggcagggtaggtacaagatgaacctaaagtgtcattttataccagaaagtaagaaagtattaaagtgtttaaaaaagtgatgggagcatatcacaaggattcagaagggataccaactggctaaatctggaacaatttgatcaccaaagtaagtacaataataaattctaagctattgaagtaaaggcatttattatgcgtagtaataataaatagataatgagagagaaatgaggactcatgcttacagtaaaatgccaggagctgactggcataaatgtggaaggaaggctggagtgggaaaattattattttgcaaccatcatggtaattaccagatcagataaggatcaacagatgccaaatctagggcaaatttgatgaggagcagaatatttgcactgtctttgagagtttctcccagagatcacttatttgttgtaaaaaaaaagaaagaaagaaaaagaaacaacaattagtggagaaatcagacaataatttgaccaggtgattaaaaattaacatcaccaatgaaggacatagggacatgatctgccttcagatgtgatactggagaaggaaggatacaatatcacttatgtagtagtccagctgagaatgagtatcatttttaaaaaccataaaaacacaacatgaggaactttctatgaacaaaaaaaatggcaaaaggggactgtatacttcaaagatgtctgttacaaaagaaagaaaggctatggaaatgttccagattaaaagaaactaagagacatgacaaatgcagtgcttgaccctggaccagatgctataattgaggcaaaaaatgcaatctaggacattattaggtcaactgacaaaactgaaatatggacagtagattaaaatattgtatcaatataatatatgaaatttggaattgcactgtggttatataaaagaatatccctactcttaggaaatgcatacttgagtatttatgtaacttgcccttaaatagttcagaaaaaaaaattgtgtgtgtgtatatgtgcatacacatgcccatgcacagagcatgtgaatgcaaatgataaagcaaatgggtaaaatgtcaacaaaaggcaaagataaacagtatagatatatatctatacctatggaagatagaaggtacacaatttttttttactactttttcctacaactttgaagattggaactcattttcagataaaaagttttaaaatgcatggaaattatcaagtagatatcacaaaatgtctgtcaaaggacatttgctcttaatccccagtttgtctttatcttttcatgtgtttggagatgatatctctgctctttcttacagatgaagttgtttatttgtctaatatttgatgttgaaacaactgctgtcaaagattgtatgggactctagccatatctttgagtttagacaaagactggaagagtttagatttactgtcattttactttttgtcagatcagagctttgatagcctagtgattccagctttttaatactctgagatctccaaaatggatgatgtgcacatgtgtaagatgcatgaggcccagcatttgggtgtgactctatcactttttgtcccactcaagaaagtaaactggagttcaagttaatgagatatctgttgtcttttaagtaaattgcaaacctcgatattataattattgttaattataaattcctattgacacttatctcacaactgactataagtaactgattaagaactaatgtagtaccctgtgagatgaaggggtggaggataatggccggaggtaaacatgacaggtcctctatgtgggccagatcttttttatattcatcttgctgaactttcttttgggctgacagttcattcgctcattcattcattcattcattcaacacatatttgttgagagactgctgtgtacactaggcttgaggtacatcagtgaacaaatgataaaatgcttttcttaatggacccaaacttctagttgggagagaaagacaataaacaatgatgataaccaaattctgtagtatataagaaagtgataagtgatagagaaaaaaaaaaaatagaacagagtaagaggggttgaaaatgccgggaagggtagctaggaatttttaaccagatagcctgcataggcctcattaagaaggtgctgtctggctaggcgcaatggctcatgcctataatcccagcactttgggaggccgaggcgggcggatcacgaggtcaggagttcgagacaagcctggccaacatagtgaaaccctgtctctactaaaaatacaaaaattagcctgacatggtggtgtgcgcctgtattcccagctacttgggaggctgaggcaggagaatcacttgaacccgggaggcagaggttgcagtgagccgagatcacgccactgcacaccagcccaggtaacagtgcaagactctgtctcaaaaaaaaaagaagatgctgtttgtttgaacaaggacttgaagctggtgagggcatgagccatgtgattctctgaaggaagagtgttccagaaagaatagactgctagtcaaaggcccttagcaggagggtgcatatctggtgcatctcagccatagtaaagcgtccagtgtcactagaatggagtgaatgagatggagactaattaaagaggaactcttccctttcactgccatcacattttcccagatggtctttccctggagtaactgttccttggattaaccccacctccattgttgagccaaacaatttggaactccacctcccccacccccaaccatcactttctggaccctaccttctgtcattatgggctcttgactgatcattccaccacccccctcccaacactgcaagtagcccaggtctcaagtcagccctcccccacagaggatgagactcctgtgcccttgccaatctgtgggacacgtcctattgtgcagcagcagcgcatatggcacctgtaccgagtcatctccgaaaacatcagcgagtggaagtgcatggcttttgccaaggtgctgacacccttccttggagctcttgactgggagtggaggactacagtggtgggggaggggaagagtctcaagctgacagtgagcccttctccctgcagttcagcccagctatggcccaggagaagacagagggctggctgacagaggcagcacggatgagcacaaccctggagctgcacagccccgtgctgcagcactgcatgcgcatcctgggggagtttcgcagctacctgcccctgctcactaagctgggcagcctccacccacagagcctcaactgccagtgtctcctgcgtggtatgtttggttaatgtcagaggagggggaaagggaaatatgtgaggttagagcgatgcagcaactcagtttcctgctgctcctgctggaaacacctttcatccccaagtttctccctacctttcccacatatttcaatttcttttccttaactgggacaaaaatttttaacttcccttactacctcctctctgctgatggtggctgggcttgggctggggccttagctctgggctctgagttgtgctctagaccttgagttctaagctgttggctctgtgttgtgctctgagatctgctatctggggtctgagctgggctgggctgggctgggctctgggatatgggatatgggttggactctgccacatactgggtgttgctctgacttgttttctctacctccagcccttgggctgggcagtctccaaactatagaactcctaacgctgggccagctgcttacttatccactgctggagtttgcagatcgaatcaaccaggtggggccctcagtacaggggcgagggaggtggtccaaagccaggacctgtaataaagccagtcaagggtggtgggtgtttggcatgtgatttaatgtggggttgagcctgctaacctgcctgaagggcaggaacagtttctttaagtctccagatggggatctcttgtgtgattccagactcccagtgactgagagtatgtccctgatgggggaaggaagtgggtggcagccccgaagttgtgggcacacagaatggcaggtgccccccaacacctgtcttgtccccagagggtgcgagctgactgaggtatttgctcagttggagccttgcaaaagtgggtgggggttccaaagcagtggccctggggcaaggtagttagatgctgccgatggcctatctttgaagcctgatggtcccactctcgcttcatctctgagacctccactttcctgagccctggcccttgagttctgcctcagatccaatccccaagtctcggctccaagcctgtccccgaagcagttacccagtcctggttcctgagacccagctgttccaggtctggcagaatgaaaatgaacgaattcatgcccaagagactatacggcggttgcagcggtactgggaagcgcgccagctgcgcctgctcaacttcatcctgcatgtaccctacgagcccccagcctcagagcgctccaagaggcaggtgctccgcagcccccaatgggaggtagtggacaaagatagtggcaccttcatcctctcaggtgagacccagaccttgtgacctagtgaaagccccctgctgggggccattttcatccaccatatccatcaaggcctgccagatctgattctctagccagggccccatccttactagacagcctaagacattagtctgttctgagacagtgtcttccatgtagcccccctactgtcttaatctccttgggatccccttcccctcacccatctctactcaatgcctgggtccttcagcaaaggtcctcccctttctgggtaccctcagaaattcctcatagtcagttatctacacctttcaatgctctgtcctctagattgcaccctgctgtctgattttataccttattcattaattcatttctttattctctccctcatcaaacctgcctcctctgtgctaaacacaggagaccttgagacttacagacagtatccctgtcccccagaaatttctgagtccagtgaggagagacagacaatactatagggataaacacaatggagcaccttactgagggcagtagaatctcagagagaggaccagctcaaagaaccagagagagaattagagaagtcttctttaggcagaggccttatactgactttttgaaggagtaagagtttgccaaacttgccaggtgagaagggcagaccagacaaagggaacagcatttacataagcatccaagatgatatagctagggcattgccaatagaggagaattttcttattcaacgcaactagaacccagttggtgaatccaaaaaactaatgatgcatacatagtttaagatttttattttagcttaaaatacatacatgtacatttatttactaacgttttaacctaatgacaagagcttttgtttgatttgatagttcctcactgcctttcttgcattaatgtattgtctactatttctgctttcactttctgcaaagttgggcagcaacatgaagacacttttaaagtccttatgaagggaagggccttagctgcagaagctgggcactgtgtggagagagggaggtggggagaggacttccaaggagattaagacagtatgggagttacatagaagacactgtctctatgtgacttttccaggtttttattataagttcccaatttataaaaattgacttgcctatacctaatagcatatgtttaatcagtttgcctttactgaagctttctgtggtttccatagaaacagcaactttccccccaccaatgtgtcagtggttgttacaatattagattcaactctttacttaaaatcacaacataactcacataaatagatttgcaaacacactcttattcttagtgcgcacacactttaactagtggaagcaaaaatgtttgggtcttgtaaagaatagcttgaaatctgcgagtttcagttcagttagggctttagtccgtacatttgatggtaagaatggggagcatgaataaaagagcttctatcgctctgtggctggatcccaaagaatagtggaggaggggatggagcagatggaactggagaggatcagatcatgcaaagtcttgtgggccacattaataatttactcaataacatgaaaacaatagagggtcactgcatgttttttgtgggtagtaacataattagattttagtttaacaatatcattctggtttcaatgtggagaatggattgaagggaggcaaggaatggaaattgaaagatcagttaagggatgactggtataacccaagtgaaaaataatagtggtctagatgaggacagtggcaatggggaaaggaaagtgggtgcactcaagctaggcagaagtcagctaggcaagatgtgtaactggttcaacttctgcatagaggagaatgtaggtcctttccattctaatatagatgttccttattacccaaattctttatccttatcacctctttatatccagtatttggtgaggggtgccttttccagccatttgcagcacattgataaatggcacccagcccccttgttcacatcgcccttattaaggactcttaagttttggtgtggactgacacaaaggctggatgtctgcagttaacatttgcaccaagattgaaaggagattgtcttcccacttttgtcctgagcacattttatgctaatccatttgcccatctctgaccctggttccacactttgccagtctgctcctacttgatctctaccacttttctgcctcatccttagatttctctgctactaaaagtaataaataaaaattcgtaatacaaagtaaaggctctggataatgtgggccttgggatgcctgtgggcataatttcagataccagcctgggtcctaccagtctttcctgagctcacagcccttcctccacctttgctccttttcagttttcccttctctctctaagctagcatttgcaccaagcacttgtgtggttgaggtttctccctatgggttctctcctttctctgtaccaggctttcttttcctgttaactccgggcatgttaaccaaggaccacatctttgtagtggccacacaccatgaagctggtgacttcgttcacccaaataaaccccaaatgatggacttgttatatatttaattcttacctcaagaagacaggttgttacaggattgggcacacctacaaattattaatctcccctttagattcttaaccaaatgaggacaaggatatatatgaaaatgaaagtatactatcagaaccatcacccccaaggaagtttgtgctttttatgtatcatgttggcagacacagcttggatctaggtcaagtgagacttcgtgctacctcgtcataatcttcccccaattaattgagaacttgaggtctgtgtggatatgcagagaaaagctgaagtacagttacacaggtagctgtgtagaggactgtggcctgcctcatatcccatagagcataaaagatgggcctctttgcctcctcacatggggaagagtaagggaagaagatagacagaggggctgaaagcattagtccagtgctgttttctctagagagtggagtagaagttgtgtgactctgagagcaggataatgagttttcttcccaccagggatgtttggagagtcctacatgtgtctgaataaacctcctttcttgattcttctcatttttaccccaattagtgtccctacctcatttccagccctagtcttaccaagcacttgtggcatgaagggataactctttaagcagcaccagggagccaagcactaagactatgagagaaaagtttgttctcagcttctctaccaagacccgttttaagacagaatgggcattcttgctatagaaatattacgtagggtcctggagccattcagccctcttcccgggctagaggctctagttcttacaaagcacttccatggagttacgtggatactcatagcagctagtcagggaaattagctggcctggagtctgcccacagtgccttgggaaaggaggagcttcttctctcaccattttgagaccccagtgctttactggctctacatattggctgatggaatccttaaaggcagaaagggcagctgggcatggtggcttacacctgtaatcctagcactttgggaggctgaggtgggtggatcacctgaggttgggagttcgagaccagcctgatgaacatggtgaaaccccgtctctactaaacatacaaaaaattagccggacatggtggcacacacctgtaatcccagctactcaggaggctgaggcaggtgaattgcttgaacccaggaagcatagtacagtgagctgagatcgtgccattgcactctagcctgggcaacaaagcgagactctgtctcaaaaaaaaaaaaaaaaaaaaaaaaaaagggaaagaaaaagacagaaagggcatcagggtctctgtaactgcctctcctggaaggttcccctggtctcctcttctctcccccagccccggcccttgcctcatctgactgccagttcagctttttctgtcttagattacagcaacctgcaggattccatccaggaaagtcttcaggtgttgtccaagatcttggccatcgaaaagtcaggagatttaaacaaaatagctttggagtgggtggccatcatgcatggcctgggtaagtgcaggcctctagccaggctgatgggtgagacctgaggcaggatgtcccagagggatgggggtgagaggtggaggttgggtgggagaagatatgaagaacacagtgaggacctccttcagggctgtttcttgggatgaagagatcaggtttttattcacagtgaaagttttttctccctcaagcaagttccctgagtcctgctgggcagagtattttgcttgggctggtggggtacctgagaggtcaggagcagggtggactcccctgcagaaggtagaaccctagtgtttcccaccagcattcctctggctgcttacacaggtgccctgctggaggtgtggctgactttccagcagaagtggatttttctgaataaagttctgcatgagatgaagatccagtttcctaatgctgacctggtagggaagggggttgaggcagagagggcaagaagggttcctgaatagcagggctcagcgtgggaaaggggagctgccacttcatattggccctcacttttatcctctccctcaccacagaactctcgtttcaaggtcatggatgaccagtatcgaaccctgatgcgcatctctgtagctgaccccatggttctgtcacttgtagtgcccagtgccgagaggagcccttacttccaaggccagcagctgcaacaactgctgcaagcaggatcggtggagctggagggcatcatcatgagtctggagagcgtgctctatggggtgtgtgctcacttcccccgcctcttcttccttagtgacagtgagctggtagccctgctggctgctcgactggaatcatgcgaagcccagctatgggtacgacgctgctttcctcatgtgcatgctgtgagcttcaggtcttgcccaactggtgagaaaaacacagatgactgggagtcaagcccaaacacacagactcaggtggaggcacttgcagtgctaggggcaggtggggaggaggtgaagctgcagggtccccttcctctgcatccagatctccctaagtggctggcctctctggagaagtgtctgcgcttggcactggtgcacatgctgcagggctgtgtggctgctcgccttgctcgaggcccatctctaggtgaggccctcaagcaactgcccaagcaaaacaagttgtacctgcaactgtatgtccagcactggatcgacttagtccaggccttcccatggcagtgtgtgctggtggcagaggaggtggtatggcgggccgagatggaggaggctctgcttgagtggggtaccctggccatggtctccatgcatatgcgcaagcttgaggtactggtgaattttatgcgggcccagagggcttcccaaggtgggcagtccctgccttctgtccgccagaccagccttctcagtgccctgctggtcatggcagtgactcaccgggatatagcacagctgctggaacagcaccaggtcagtgatctcacagactttcactgggtccgccaactcaagtatcacttgggttcacctcacataatccccaaaagccccctacagagtcttaagactattgcatcttctgaaccctctctgtcaccagcggcatgctggatagatgtgctaggcaggtccttcctgtacaattacgagtatctgggacctagactagggcctctacccagcctactgcctgaacggccagccctggtactattattggccctagaggaggtggcctgtgggaccgtactgggtcctaatggtgtgggcaagagagctatagtgaacagcctggcacaggccctgggccgccagctggtgatgctaccctgctcacctcagatagaggctcaatgcctgagcaactatctgaatggtgccctgcagggtggtgcctggctgctgttggagaaagttcatcagctgccccctggcttgctctctgccctgggccagcgcctgggtgaactgcaccacttgtatgccccactgtaccaggaggcttcccgaaacacaagcaccatagaccccacccagccccagctccttggcagtagcttctttgaaaaacatcacgtgtctgtgcgccttggctatggctgtctcctggtactgcgtgccctgagctctgctgtgcctgccaacctgcacctgctgctgcggcctgtggcattggcattgcctgatctgcggcaagtggcagagctgactctgctgggtgcagggatgagggatgccttccagatggctacccgcctatccaaattcttctctctagagcgtgagctggtgtctgggcccctgccctgccgcctgccactgctcaagcagatactggaagacacaatacggacactaaatgtgaccaaggaggaaccgaagtgccagaagcctcgcagcctagctgccattgaggaggctgccctactgcgctcaccactgtttagcattctcaatgggctccacctgcacaacctccgagggctgttgtgtgcgcttttccctagcgccagccaagtgctggcagaacctatgacttacaagctgatgaagccattggtggtggaggaactgcaacaggtaggtctggatcccagccctgacattttggggtccttggaacagttgagccaggccctgagccgggcctcaggcattctgctcctgggccctgcgggcagcggcaagaccacttgttggcacagcttatttaagatccagaatcggctggcagccatggaggacacctcaacccaaggctgccagcctgtggaaattacccacctgtaccccagtggcctcagcccccaggagttcctgggatggctagagggctcctgctggcatcatggcatctttcccaaggtacttcgtgcagccggtcagtgtaacaacatgggccaaaagaggcagacagaggaatcaatcgggatccagcactggataatatgtgatggagcctccaatggtgcttggctggactccatcacttgcctcctgagtgagcttccccagcttagtctccccagtggacagcagatagcacgacccccaggcacctttctcttgatggaggtggctgacacaacaggcatatcccccacagtggtaggctgttgtgccctagtctggtgtggtggagagcagacttggcagtgtatacttagtgccctgatggcatcccttccttatgagtaccgcctgcagcaccggacagtcgctgagctcaaccacatggctgaggttctggtgcctgcaacattgcgattcctcacctgccaaggtgtcagctctctgctgcaggtacacgggcagcaggctgtttgtgcaggtgtggcagaagttaccagcatggcacgcatcttgcatagtctgcttgacctccaccttcgcctaaaggaggagaaggcccctggcccaggtgggaagatggacgggctggtttgagagagatggggccttaagggtagctggggtatatagctggagcctggggcgtgtgttctttggtggatctgggccaggagtgaaaagtaatactgtcaaccttttttctttctttcaccttccacctttttctactggggctcctctcgtggccatggcaactttcacagaggacctcagctatagtgatcctgtggcccaaagcttcaggtcttcaaaaagcagctttctaaaccggtcccaggttgacagtgacgatgtgccagataagtgcagggaacacttgctggctgtcagcagttttctttttgccttgatctggggctttggagcccaccttccctccaggtacctaccaggatgggggatgggagatgcagagggctgagatggactggcccatggaagtaaaaacccacatgacatcactgttagggtatggtggagtgtgtgagtgtgtcataaatggaagtgttgtaactgtctgacgcttttgcctgtgtgtccatctgagcaggttctggcccatctttgataccttcataagggattctattagtcgcctctccaactaccctgagccaccaccctcagccttggtgtttgatctacatgtaagccctgaagatggaacactggtccccttcactggccaatacctgagcagccacatcaaaggaactttgggcacctttcacccttctatccaggtgtgaggacagtaaggcaagagctggggttagaacttcaggacttattttaggggtaatccatgttcaaagatcagctgaggcccacttgctccctttctttgatatattttcacaatcacaagaatacatgaaatattttccaagtacagctctaggacaagtcccttagacttttattttcagctagattactgtcttatactggaggtgctgcagtaagtcccacttctgtcttgcagactgaacggctcttgtatgtggtggacctgcttctgtcagggggacagccagtgttgctggctggagaggcagcaacagggaagtcagcctttgtggaggtgctggtagagccacatcacccttacatatacagccccatccaccctgccttcagttcctcccacctccgtctcctgctgagcagaggaatccagggccaaacacaagccagcccacagcctgggcatcaccaggattctaaaccctccctcctcttcttgctggaggacctgcacctagccacttctggtgaggagctgcgaagagggaaggaaggagctactgtcatctcttgagactataaaatccctagcaatattcattgactctcaaatatatgtctgtagatctaactttagtgttctgttcttaatatcttctcattctacatatgctccctgaacaatcccatccactctcatggcctcatctctgctttgctaaatctctgtgtccaatctcacttcttttctaagcaccagatctgtctatccagctgtctactgtacgtctccaccttgttgtcctgttggtacctcagacccaaccctgagctcatcatctccccgcggccaaaatctgctcctgtctgtcctcttagtttcaccatccagccagtcatgtaagccagaaatcttgttgacatctcattctccttcaccaatatccagtcaccatgtcttttcaatcctacctccttcatatttcttgaatctttccacttatttccatggttcagatgatctttacttggaaatctgacaaatgctcttacaaagctttctgtgatgaggctttcttctgtgtcctcttacactctctctaattggacttaacaagtcaggcttcctctagaccctgggattgctgtcctctctgccttctctatgtggctaaattctacttattatttctaaattacctaaggcagtagcttctccaggaagcctgatccataggctcggttagatatccatcctgtgctctgtacaataatctgtgataaccatgattttattattgtatgcttgcctatctgtccctttcaccacacttggagatttatgagaacagagaacagaaatttgtctcattcattttggtagacccaacaggaagtaagtgctcaataaaagtttgtagaagacaagataacaaaggaaaggagaaaaatcttgataaaaatttgggatattgaagtgtaaagtttctaaagtggtatgcctctagatgatgagagtttctaaatatggccatgggattgggaagtgaattttaggtagaggttgttggagtcaaggaagtcaatgggctgaagcactggataggctatccagttaaacagcgaagtctcttatgagatgtagaaaacttgaaccagatgtattcgtacttaataatagccagtacaatttattgaatatctactatgtgctctatgatatgtctatgtcatcttcagtgctcataaaagccaagtaagatggggaatttttgcaattattttaaagatgaagaaacagagacagagattttagaacttgcccaagataccctagctatgaagtgtcagaaccaagattaaaattcaagtctatttggttccaaaacctgtagttccttccagctatattatttggtctttgcaatgaatttgcacaaaattagagacaatagaaggagtaaagagtggtacagtcagatatatgaagagatttcagctgagaagagacttcagcaacattgtagagtgaagaatattactgctggcagaatgtaaaaggtgtccttgagtgacaaccaccagaacatccagtataaaataaaaaataaatagacatgccaacaaaaacccccagaaaataatgtgacctgctgtcaagaagaagcaagcaatagaatagaaactgaccctgagatctatatagctgtacgctgtccaaaagatgcactttaaatataaaaacacagatagattaaaagaagtttttaatgcaaaatatttactacagaaatagtttgcataaggaagttgatgtggcaatattaataccaaagcactttaagacaaaggatattaccagagatagaaaaggacatctcataattgaaagattcaactcatcagaaagacaaaagtcttaaatgtgtccacacctaaaatagacatttaagtatagggaaaaaaagccaatagaaacaaaagagacatagtaaatctgaaatcatattaagaaattaatatgcctctcacaataactgataagacaaggagcaagaaagtagggacattaaagatctgaataacactagcaacacactgacatttacaaaacattatactcaccaactgcaaaatgcaccttcttttcaaatgcacatgaaacattcaccaagatagaccatatgctgggttacaaaataagtctcaacaaatttcaaaggattaacattttaaataatattttatctgaccataacaatacaaatattgataagatgcctagagaatttccaaattctttaaaattaacacacttctaaataatgtaccaaaaaagaaattacaagagaaattagagaatgttttgaactaaataataatgaaaacaaaacatatcaaaatttgtgagatgcaactaaaggttatagctttaaatatctatcttagagagaaaagcttggaatcaatgacctaaattttcagcttaagactctagaaaaagaagagcaagttatacccaaagcaattaaaaggaaatcaataataaagaacagagcagaaatcagtgaaatagaaaaacatacaaacaatggagaatatcaacaaagccatattttgtttctttgaaaaagataaaattgacaatcgcctattaacacaaatcaagaaatgaaaaggaaaacataaattttgaatatcaggaatgaaagaggttttattaaagatatttaaaaggataaaaagggagccagggccgggcactgtggctcacgcctgtaatcccggcactttgggaggccaaggagggcagatcacgaggtcaggagatggagaccatcctggccaacatggtgaaaccccgtctctactaaaaatgcaaaaattagctgggcatggtggcatgtacctgtaatcacagctactcgggaggctgaggcaggagaattgcttgaaccagggaggtggaagttgcggtgagctgagatttgcaccactgcactccagcctggtgacagagcgagactccgtctccaaaaaaaaaaaggggagccaggcatggtggcatgcacctgtaatcccagctactagggagggaggcttaggcaggaggatttcttaaggccaggagttcaagaccagcctgggcagcatagtgggaccctcatttaaaaaaaaaagttttaaaaaatggataataagggaaaattatgaaaaactttatgctaataaatttagcaacttaggtgaaatggatacatgctgtattagtctgttttcacactgcaataaagaactacttgagactgggtaattcataaagaaaagagggttaggccaggcatggtggctcacgcctgtaatcccagcactttgggaggctgaggcaggttgatcccttgaggtcaggagtttgagaccagcctggccaacatggtgaaaccccatctctactaaaaatacaaaaattagctgggtgtggtgggggtcacctgtaatcccaactacttgggaggctgaggcaggagaatcgcttgaacctgggaggcagaggttgcaacgagccaggatcacgccattgcactccagcctgggtgacaagagcaaaacttcgtcccaaaaaatatatatatataagtaggtttaattgactcacagttccgcatggatggggagccctcaggaaacttaaagtcgtggcaaaaggcgaaggggaggcaaggcacatcttacatagcagttggcgggggcggggtggggtgaagagatgtaccatcagaacttatgagaaattgctcactatcatgagaacagcatgggggaagccggccccgtgatccactcacctcccaccaggtccctccctcaacatatggggattacaattcaagacaaaatttggttggggacacagagccaaaccatatcacatgccttacaaaaacataacttgtcaaagcttgaacaaaagaagaaaaataatagaaaatgaacagcctcatacctaagaaaagtttgaatgcataataaatgtttccagtcccagatggttatacagttgaattatatcaaatatttagaaaaaaagtacaacttatatatactttttcagaaaatggagaatactaagccatgatgaagacatttcaagcaaagaaataaactgttatctttcataaacctaaatgcaaaaataaatcctcactgaaatattattaaataaaattcagcaacatacaaaaagaataatatcttaagaccaaacggagtctatcctgggaaggcaaagctgactaaacattgaaaaatcaatcagtgtagctcacattaacagaataaaggagcaaatgagtaagtaatattagtagataaaaatcacttgacaaaattccaacactattccataactcccaggaaactaggaatagaagataactttctcaatttgatgaaaagcatctattatacttacagctaaatacatacttaatggttaaatattgaatactgtccccctaaaatcagttaaaaggcaagaacatactcactgcttctattcaacactgtactggagaccacatcgacgcaattaagaaaaagaaataaaagcttttaaaattagaaaagacaagttaaaactgtctgtattggcatgtaatatgattgtctacatagagaccccaaaggaatatttttttaaaccccataaaaaactactacaataaataagttaattcatcagggtcacaggatacagaatcaatccattgaaatcatttgtacttctatatcctagtaacaaaacattggaaattgaaattttaaaatatcacttaaaagtcatttaaaagcataaaatacttaggaataaatttaattaaaagcattcaagatctgtacactgaaaatgactaaatattgctgagatagaggaaatgtaaataaatggagaaatatatgatgttcatggatcagaagagtcagtatcattaaggtcttcattctcccccaaatgatctatagattcaatgcaatgccaagctaaatcttaacagatttttttttggtaagttgacagtcttattctgaaacttatatagcaatgcaaaagatctagagcagccaagcaactttgaaaaagaacaaagttgggacacctacactagtgatgttaaaacttgctatacagttgttgtaatgaagagagtgtggtattggtataaggatatacatatggactaatggaatagaacagaaaatctgatatatagtcatatgtggccagttgatttttaataaatgtgccaagataattcaatgggggaaaggatagccttttcaaaaaatggtgctggaacatctggatatatgcatggaaaaaaatgaaccatgtattctacctcaaaatctagataaaaataaattataggtggatcacagacctaaagctaaaactataaaatttttagaaaaaaattggagaaaaatctgtgtgaccttggttgggcaatgatttcttgggcacaaaaactaaattttatcaaaattgaaaacctatgcccttcaaaagacactgttacgaaaatgaaaaaaataagctattgacagagaaaacatgcatgatacatgtatctgacaaaggacttgaacctagaatacataaaaaactcttacaactcaataagaaaacaaacatcatcccaatgttttaaatggacaaaagacttacacttcacaaaagatgtatgagtgggcaacagtatacaaaaagatgcttgatattatcaggcatcagtgaactgcaaatttaaaccaccatgtgataattaaaaagactgacaataataagtgttttcaaagatgtagagcaactgaaactctctcactttgatggtgagaatgtaaaatggtacatccactataaaaaatatatgccagtttcttacaaaattaaatattacttaacatatgacccagcaattccactcttaggtattcacccaagtaaaatgagaaccgcatatcctcaaacttagtatacatgaacattcatagcagcattgttctgtataatggtaaatccacatctccacccaaatggctccaggtggtggcaagagataagagtttagaagcgcctctcccacccagcagactagctccctgctttgcctcctttcctttaaaaacaggccattcaggcatttgcctgaaaacttaaaatgacccacaccctattcccttacatatactgccagtccctccctccatccctcctctcctccctcattccctctctctctgtctctctctctgtctctttctctctctgtctctctcaatctaactcttcattgctgcctcaggtgacatgaggatggaggactgatctcccggctcattatgccctccttgcacaggattaagtaaaaatctttgaacttgtttcctattgttgtggtgtattgaatttgtccttctatctaaagaaccagaataagttttctgtgtgaaggactctctggtcacaggtcagacaactaggcattaggctgtccatcagataaaagaagtatcctgtgaaaggcacactgtaaacccccacactcagctcccctttatttcctgttagggcagggttgttggctgctctggtactagaacaccagtttaactgggggctctcagaaaaatactactcaggaataaaatggaacaaactaaggaaacacgcaaaaacatggatgagtctcaaaaacctgctgagtaaaagaagatagacatgatcaagtacataccgtatgattctatttatatgaggttctagaacagacaaagctaacctatagtgatggaaatccgatcaaataacaatgcctgtgatggtggtggcagagggattgattggctttaaaggagcatgaggaactttctagggtgatgaaaatgttctaaatatcattggggtggtgatgacacaggtgtgtacattagtcaaaattcactgaactgtacacttaaaatgtatacattttgttgtatgtaaatcatgtcttaataaaatttatttttaaaatttattattattattatttttagagacaaagtctcactctgccactcaggctggatggtgcgatcagggctcactcaagctcttgtgctcaagtgatcctccagccttagcctcccaagtagacaggtctacagcacacatcaccaggcccagctattttatttttcattttttgtagaaacaaggtcttgctatgttacccaggctggtcttgaactcctggcctcaagaaatctttccatctcagcctccaaaagtgttgattacaggagtgagccaccacctcccagcctaaagttgatttttttttaagtgcacatgtgatataactgtattctctttgactgaaatgattgcgctttcctgctaattgtgatcgatctggtttctatccttctcagcttccaaatcttattattcattaaccttcagttaatgattattcattattatcattattaaccttcggttaatgaataataagtcacagaggtaggatctagggagaagagagaagaaattcctcaattttagggagaatgtgggggagggagaatagcttactcaaatgtgaccaagtcccaacacgtcagattcacaaaattcctttagaaccgtgtgtggcaggaatagagggaacaggttgatactctcatgtggacttttacatgtcctcattattattcctcatgtcccatagacccagagaagagctgccagccagtgttggagactctgcgccaggccatggatggcactgtgtatgcccacagcaccttggaactgcagacgctgcagcctacagtcaacttccttgccactgtcacagtgccaggatactgtgagcgcccactgtgtccacgcctctttcgactcttcacagtcctggccctggaaagcatgacccaggccaccctgctggaaagacatgtgcctatcattcaggcttggcttgagcgtttcccttctgtggaacgggagcgtgctctggcacgaggtctggttagggcctcagtagaggcctgggaggctgtgtgcaattgcttcatgccttcacccctccacccacactaccacttctccctacactctgtgagccacctactgagcagcctgcagctgctgcccaacagaacaggctcccgaggttttgtggactatcccaaccaccaggagcacttgcgccgggtgtcaggcctgcgaggcacttgtctgaccgttatgatggccacacgcaatgtggtgcgtctttggttgcatgaggcacagagaaccttttgcgaccggctggacagccccagggaacgctcctactgtgccaagctgctcctagtagtagctcaaagtgtcttctgctgtgggccagggccccagcacctgggcaaggaccatcaggagagtgaggaggaggaggaggaggagagggtgcccgaagtagaatctgaaggggagttggcccagtgggaggacttcagcaacagcaatagtgaaacagaggaggaagaggaaccttatggccttcaggtcgccagagtctcaaactccagagatccaagtctaacaccatccataggaccagtaagcagggggatgaaggaaagcataagtcacaagataaggcaagagaaaggcacaagggcatccaactataggctccaggtaaggagatcattcaagacttggtggcagaagaaaccccagatggacctgatctcacccttgttgttaccagtgttactactacatccccaggaaaagccctcagacctggtcttcagtcaggagctgatactggggcctaactctgagacccccaacttgtacctggaacgacagtgggagaagctagaggagcagttggccacctcagctgctcaactgaagttgagcccccacctggcccggtgtcattccatggcccagcacgtggcccgcctggtccgggtgctggccaggccccggcagcatggcctgctgctctcgggggctctgggtactgggcgccacactgccatcactctggcttctagcatttgtcaggcccatttctttcatctaccatctgggtcagaggaggccattctccaatgtctacgagatgccagctggcatgctggcatgttaagccagccagtggctctgttggtacccagtggtgtggatctcactacacttcatcgcctcctggccctggcaacctcaggcagtttccctggccagtacacagaagcagatttggaccgcattggagaacacctccccagggagaaccttggtgtcaaacagaacatcaagaaggaaatggtgttgcagaggtgaggccaagaaccccatatgcgaatctgctctgctcttacgctgtcttggccaaaaggccaaaaggaattctgtgggctgccatgagggctgagaagattggggctaagtggtctggctgggactggggccaggaggggcaagcaaaggtaaaggggaggacattagctgagccctggcccacaggttccaccagcaagtgtgcagccaccttcacctgttcttcctgattggagataaacaggcccacaagcagctgccctccacccttttcctgaggctccttcaactggccactgccagcattgaccgctatgaaccctgggaccaagctgccctggccaaggtggcccagcatcacctggagggtgctcagagtgtgccccttgatgacggtaagccctttttacttgtccttaccactcatctctaccaggctctaatgagggttattacctaggtcagtctctctctctccctctctagagcctacagagcccccttcacatttcctacccttcttcctgagctaggagaggatccctttcctttcctgttttcctacaagctcacagagtgaggctaaagccatgcccattgcaggctcctggaagtacccagacctccaggcctcaattcccagtgtggccaaagccatggctcttatccacctttcggccacccactaccatgagcacctgtgccctgcattgccactcgtcacccccaagaccttcctagacttcctggacactttcctgatgctgcagcaacagacaatcctgaagattaagaacaaggcccagcggtgagtgtcccgtcccctgcagtgtacctccttctgctcctttgggtttcctcaccagcacattgtatctccagggtccagaatgccttggagaatctgagaatgctgattaaggagcacggtacccatgccaatctgatctttgacttggaacagcagctgaaagactccggcaaggtaaggagatgattttgaggcttccatggtggtgtcaaagcaggagcccaaaggggacttgaaaggaagcaaccagaatgaaccttaattcttgtccccctaagcttcccctttccctaggaaatctctctgatctccgctgcctcctcctttacagcttaggttcaaaagtttcccatgatacagctaagaccagattgattcttcataacaggtgaaacccaagcatctgcttctggctgcccctagtaccatgatcatgtgaagttcagtatgctgccaagatctctgtagattcccatgggggttggggcaggcattacatctcagtcaccactcactcacctcttagagttatcctctttttccataacactttgtccccataccctttcttccacaaaagcaacaaacaaaactgttgtatacagtgaggacatgtagatgggtgatggcagcagggagaaatttgtattatggcatagaaccagaagtaaatttataatggtatactagacaagagtgtcctgaattgtcttactcaccctcctctaccaggcattttccagtgaccaacttttcctttcctctctcgtctctctaacacctgctctacaatgtttttgagccgtcccatttttcctttagcgctcccttctagttgaaacctcaaaaccttttgctgtcatacagaacaatcttattctttgaataaacaaacttcttatatctggctaaaattggtgatgatagggcttatcacaccttctaaagccaaatactcctagttaaaggtgtcttcccaaactaaagagcagttttgtttttaataagaagaattctaaaatagcacctttttttcctactacacaagatgttgataaatattctggtataacttcagagcagtgaactagtgcccatctcacactcagataatctttctactagggtttcaggtcttaagctcctaatacctagccagctcttctgataagtgcctttaggactatcatccagtgccacacaactccagagacatggcatatgtcgtgtctactaatatggttttcactgtgttttacataaatggtatcccctggagttttaaaggtactggtgccctcctactattcaccacctaggatgaacagcttagattagacctcaagactcagttaagttgcaaagaaagaaaagaaagtcagagagcaacagaaatcccctttcccagttttttgccctacattttcccaagatgattaataccaggattgttgatctggtttaggggtcctagtattccttgatctgtgagtcagttacaccagagcagaacacagtaagccaaaggtctggataagagatgttcgtagtctcagggtcattcagagtcagatcccttggtcgttcattcaatagccataatagtgtgtacttcttccagtgttccccaccccaagaaaaggcattaccacccactgagccaaatcccaggactcattctgggcccctccatctctttactctcttatatttaactggttaattttttcattattgcactcaacaaaaatttattttttgttcaggcatttcttaatatttatgtctatgtcaatatatgcctacatttacatctagatggatggatagatagatagatgatagaatccttgcccacacctttctgaggtagctattcttttctcactttacagatgagaaaacaaagatccagaaaggttagggagacttccctaaccttataaggttgtgatgaggattaaacaagatcttacatgtcaagtatttaaatgtgctggcacatagagctcaataaatgttagttactattaatattaggttaggccaggcacagtggctcatgcctgtaatcccagcactttggaaggccactgccaatggatcacttgagcccaggagttcaagaccagcctgggcaacacagcaaaacactgtctctacaaaaaattactcaggcatggtagcacctatctgtagttccagctactcaggagtctgaggtgggaggatcacctgagcctgggaggttgaagctgcagtgagaaatgattgcaccactgcactccagcttgggtgacatagtgagaccttgtctccaaaaaagaaaaaaaagaaaaaaataggttagattgcttcctaataagaggagatagggcactatccttaccttcatggtgcttatagtttagcagaagataagaagatatagactcatccaggcaatgacaaaaccgtgttataacagagtaagttcagagcactccaaatatcaagaaaaactttctagagaaagcagagtgccccgctgtgcagcacagagcgtgtatataacatggtaggagctcaaaaacattcactaactgtataaacaaatgaatgaagtacatgacagttgatgcctgaaagttaggtcagatctgatcagtgtttgaaaggggccaagtgacagaatgtcccaggttgatataacagcatgtgaaaggcctagaggcaaaagagtgtgtgccacattggaggaactgaaagtcaggaatggctggaaagtagcgtgctaggagagagaaaagagatgagattgaaatgatgagtaggggcctggtcatgggggtattgtcaatcaaatgtagaagtgacaagtgttaatgacaatgattcagtttttagaaaaccagccaggctgcagtgggggaataaaaggagggaagtaagagtggaaactgagagaccagttaggaggccagtgtagaaggtcgggagtgagagggcctgagcatgagtgactgacattgggaagggcagtggacacgagaggcatttaggaggtagaattgaaaggtctcaaagatgggctggatttggggggattcaggagatggagccaagggtaacaactcagtttgttccttgggaatcttgccaccattctctgagaaaaagaatacacaggagaggagtcagattgcaggagagctgaggacgcataaccaatacattcatttggggacatgtggagtctgaggggcctgtgagacccccaagggaagatttccactaggcaaatgaatacacggtatggggcagggagggaacctagctagagagagagatttggcagttggaacgtaagtaggaatcaaagccatgagattagggagggcatttagaagtgtagagtgagaagagaaaggaggctctgaaaaaattgatgaggaatagttaagggctgacagaggaagagaatgagaaagagcagccagagaagttagagaaagcccaaggagaacacagtatcatgaaggccaagagaggaggatgcctcaagagggagggaactgtcttctgtgacaactgctgctaatgggtcaactaaaatatagagtagtgtaacataactgttacacgcatagtcttcgggtgaagcggctgcagaaaaagcaaccacacacttggggctgcgttactagatatataactcacagactaataagtgacagacccagagctcagcctctctctgtggcctacttggagttcaacgtggtcagtctttcaagtgaggagtgtgctacagttccaggatcatagggtcttctggggtttcccgcgtggcccaagatctggagctgcagggcctggatctgtctctgcagagtctcagcatgtttcagcagcagctagagcaaagcaagctcctatacaagcagcagctggaagagtgtcggcatcaagagaacctcattgagaacctggccaggcaacgggatgccctgcaagctcagcgagaggctttcctggagcaggtgggctcttcctgccgcctgccctgcactgctcctctctcaaaagagggcaacccctctaaggataccaagaggagaggatggagtgactcatcatggaatctcctggggggaggggacaaaggtaataggatggcttggggagtggcctctcatggggactccaaggagatgattcccctaaaaacaccttgaaggaagaacagaacatctcaggagctcacttcagagggtatctctcctcatttagatgagcaaggcatttctggagcctctgagccagctgcaggtggctgactttgaggagatacggagctatcgagcaccaccagaatctgtggtccgggtaactgatgcaatgtgtgacttgttccaccatgaaacaggctgggccagtgccaaacagctgttatgcactgaggatttttatcaggtaggaagggtggagcacaatgaaggaggataggggaggcataaagggacacttggcaaggctaaactgttgggtcaaggtccagagcatccgtggcttccccatcccgttaacatacatccttccaggagctggtgttcttccccaaggagaagataacagactcagagctgataaagttacatctaattctgaaggctccaggtatggacgatgcagccctgcgggcagtgagccgacctgcagccagcctggcagcctggctctgggctgttctgcactatgggctggcgcattgccggggactgcccacggacctgctgctgcagcaagtggaggcaacactcactcgggagcaggcccgcctgggctactaccagtttcaggcccaggagaccctggagcataatttggccctggctaagatggtggaggatgcccaagcttcccacaactgcgtggcaaagaccctcagtcaagcacagtgtgggcagtatcacaaatggcccatgaaggctgcactgctcacgcctatgcgtgcctggactacacagctccaggtaaccatccccctcccagatgtctcccccaaagttccttttatgccgttcgcctgctcctccctgtgccctcactgcctccctctgtccctctctgcactccttgccgtactttcctccacaccccaccttgccctccctctgccatatctctgcctgcaccctcctcactggcctacacagcctctggtcttcccttccactccagaagctgaagggacgctgcatgactgtgtttggagataccctcctatgttcagctgccatcatctacctgggtcccttcccaccattgcggcgccaagagctactggacgagtggttagctctgtgtaggggctttcaggaggctctgggcccagatgatgtggcacaggcactgaagcggaagcaaaaatctgtcagcataccaccaaagaaccccctgctggctacacactctcccttcagtattctgtccttgctgagctctgaatcggagcagtaccagtgggatggaaacctgaagccacaggcaaagtcggcccacctggcaggcttgcttctgcgaagccccacacactacagtagttgccgttggcctctgctgcttgaccccagcaacgaggccctcatctggttggacccgctgcctctggaagagaatcgatcttttgcgccagccctcactgagggtagaggtaagcaggcataataaatgcaatgcttccggagtatctgaactgcccaacactcagcctcatgtggtctttcccttcataatgaggacactgtatttttgtgatcaggatgtcccagatttcaccagcctatactataggaacaaatttggtcacatttattttttctctttattacaatgattctgaatctacatgactgattggtccatgatcttccacttccctggtctactcagcactacccaaatttatccaatgttcagaaatcctggggaatatttctgttggctctgtttggatcggggacccatctgggtggagtattggaaggaacattttctaggaaaaggaatagagtgtttattccccagaagaagaggctggggattgagtttgtgagaaaaatgtgaccttatttggaaaggggtcctttcagatgtaattaagttaaggactttgaatgagatcaccctgattcttatccggatgggccctaaatcctgcaagtgcccttacaagaggcagaagaaaaggcatagaaaatacagaagagaggctatgtgaagacagaggatgaataggatccctccctggaattttagagtaataattgtgatagccaacatttattgagtgctcactacgtgcacatctaagtgttttctatgtatcatttcatttaatcttcacagtaaccctatgaggtcgccactaatatcaaccccattttgcagataagaaaattgagtcatagagagcttaagcaactttcctaagatgtcttcctgcagaccttccctcatgaaatggagcccttcagtgaattcctcccctaaggagtctgattcctcccctaagaagagctcctctgaatctttctgccccagggaaaggcctcatgagaaatcaaaagagagagagtaaaacggacatgaaagaggaagatgatgagagtgaagagagtaatgaggctgaggaccagacaaaagagcagaaggcagaggaaagaaaaaatgagcaggagaaagagcaagaggaaaatgaagagaaagaggaggagaagacagagagccaggggtcaaagccagcctatgagactcagcttccatcccttccctaccttagtgttctttcaggtgctgacccagagctgggttctcagctccaggaggcagctgcttgtggtgagagctggtccccacccaccctggcccctttttgacttgccccattctgtgaccccacaggcctcccacacctcagtctaacttcagttcccatccttcatcccaggcactaactatattgaagcgtcttgtgggaaccctcctatcagccacagggaagctggtcagagccagacctcgtgcctggggaatggggatcatgggtgctggcattgtgggtagggtgcctttgcctccctctcacaggcctgcctgtgttactgaccaatgtggagctgggtctagggtgcgaagaactgcaatggctgctgcaacgggagcagctgagtccaccccaggtgcagcctggcttctgtctgtatctcagcaccaccctctccctctgtgccatggaaaaaggtgaggcccagagggcaaattgccagcacagttgtgtggacacactaggccctcagcaccagccctaagagggcttcactcaacctggcccagagcaggcacaggtctatagcagggagccatactccctgtctactctaccccctggctctgccaaggggaagaggttaagcatctcccatgttaccccaagtgctaggttgtgaactgctaaaggggctgaatgtgttggatctgggcctgaacatggaaatactggaagaacagatgctgcatgaaatcttgtgcagagagtatcctgaactcgagacccgctggcaggacctaaagatcagagccctagatacctgcaaggctgtggaggctgctgaggtgcttgggggctcagtctgtgggttgagatgagcattggatggacctgggtaagggggtggagatgaatgtagatgtttggggtctgtgggaaagggccagatccatccaacaaatgagtgtatgcaggagcggctgctgacgatgctgctgttccagaatccgaagcgtcagaagccagccaagtttctgcggaacatagtgagggcccaaggaaagctatgccagctgcgtgctcattgtgaagagttagaagggcagaaactacaggagatggtattgtgggcaccctatcgacctgtggtttggcatggaatggccatggtaaaggccctaagccaactgcagaacctgctgccacttttctgtatgagcccagagaactggctggcagtcactaagcaggctctggacagcatgaagccacgtgagattaatcacggggaggacctggccagccatctactgcaattgagagcacacctgacccgccagctgctgggcagcaccgtgactgcactgggccttacccaagtacccttggtgggtgcattgggcgctttggctctgctgcaagcaacagggaaagcatcagagctggaaagactggcactctggcctggactagcagcctctcccagcacagtccacagcaagccagtctcagatgtggctcgaccggcctggcttgggccaaaagcctggcatgaatgtgagatgttagagctgctgcccccatttgttggcctgtgtgcctccctggcaggccactccagtgcttggcaggcttacctgtcactgtcatccacagtgctgggtcctgcacctgggccagggcctgagccactcagcctcctccagaagctgatcctgtggcgcgttctgcgacctgagtgcctggcaggtgccctggcagacttcaccactagcctcctgggtcggcccctggatgaaaacacgtatgctcccaccatgccctttaaacatagtcaggctactcagcccatgctgatcttgttgccaccgcctggccacccctcagccactctgcatcctctgactgtcatccagaaactggctgccaagtatcagcaggtttgaacctagtttcttggccacagagtgaccaggctcctgtgggctggggcatgggggaccccctccaagcattttcatggatctttctgtactacgtagggactttggggatcatggtagcattagtttgggtccctcgggtcaccctaggatcactttgagtcatgctgccatctcttttttggtccccaggggcagaagcaactgcaggtgatagccctgggctctgaagcctgggacccagtctcagttgtggtcagcactctatcccaggctatgtatgaggggcactggctggtgctggacaactgtcatctgatgccccattggccgaaagagctgctacagctcttgctggaactgttaggcagagccaagggtgagtttattgcctagattggcttccaggatcctatcctacacttgggccttagcttgaaatctcaggcctcatggccagtgacctagcaccaaacttgtccacttggccttgtatctgactcctgacacccctagcctcaagtctgattcctagacttctgcctgaccctttatccaaggactgatctcagacccttgtctgactctagtggttgcagacctggaatcagaacagcttttagaccaacctgaaagcaggaatgtaagcactgttcacagagattttcgtctttggcttattgtgcctgcagagtctagtgcttctttgccaggtgaggagcttaaccccctacaggctctcaaattggaagtgggagggcaactgtgctgtgctgactcagcactctccttcctccccagctgtgctgactcagcactccatgcctgttttctggaaccagtccctggagctgggccatgttttgattgacagtgtggagctagcccagcaagtactctacatgcaaccccccacccaggcactacctctgctcctcctccatggcctcctgctacaccggcagctctatggaacaaggctgcaggcacacagggggcgctggtgagggacccccacccattcctgctcagtcaatcactcaacaaacattgagtatcttccatatgctgggatgagtaaaactaattcatctttggaagctccaaagagcaagggcaaggggaagtcaaggaaggcttctccaaagactttgagattttactttgaattgagtcttaaaagcagaggcaaatcaggtagagatgggcctttctgagcagagggacctaaactcagtagaagggaggagacttgagtgtggttgacgtggacatgctgggtgttgaggagggagaagtaaggttcattataaagggcctttaagactagggcaaggtaggccaggtacagtggctcatgcctgtaatctcagcactttgggaggcgaggcggatggatcacgaggtcaggagatcgtgaccatcctggctaacacagtgaaaccccatctgtactaaaaatacaaaaacttagccaggcatggtggcaggtgcctgtagtcccagctacttgggaggctgaggcaggagaatggcgtgaacctgggaggtggagcttgcagtgagccgagattgcaccactgcactccagcctgggtgacagtgcgagactctgtctcaaaaaaaaaagactagggcaaggtgcctgattttatcctgaagacagtgggaagccactgaagggttttaagtagaagaagaaacaatatcctttttgtgtgttggaaggatcactctggatgcaacatggagaatggatcagaggaggcaggactgggggcaagcagagcagctttaggagactctggaagtctccagggaagagattgtggtatgggtagtagggtagtagccatggaagggatagagaataaatatggggtgaagaggaaggaggtgtcgaggatgactctcagatttttgctttagataattgggtggctggcggtacctctcactgaaataggaggtggaacaggttttgtggggggaaatgatgatttcagttgaaagcaagttgtatttgaggtgccaagtggcaatgaacccgaagctcaggagagaggtttgaactgaagacaagacttgacagtcctcagcatatagatgatatgtgaaaccctgctttccgctccccttctctaggagtcaagtgactctaacccaggttcttcagacccaagaccagctgtgggcaagtcttagcaatccccgtgctgccatgcaagagctggctggtgagacccttcctctcccccttggagtcatcagcccccaggagagcctggaagagggtgggggtgggatacaattcacagctttggttttggcggtggtggaaactgaaggtactggaactgagagactctaacctcatcttcagcttcagttttctacgggggtcctctgggggacactgaggacagggaggccctgattagcctcacacaagcctgcctgagccccagtagtgggagctgggtccagccacacacacctcagtctttgctggccacgctcatgcccctcccaggtaagcctcactcaggtatctgttttggggtagggaatagtgcaatgcaatgccaccccccacagaaatgtggacagcagtctcaataaaggtatatgagggggtaatattcatactgttatgggggtgatggcagtaaaggctcagaggaaggcctactctctcgagtctagggtggggagagtccatcttgtccctcacccctcacctctatccccaagagctaagggagctggatgcaatggcagagtgcaaggcccagatgcacctactgccctcaccacctgaaccccggctctgcggactgagtgagggcccccaagcctggctgttgcgacgccagagtcgcgctctcttgagtgcgctgcagcggagttcacccgtgtgggttcctgagtctcgaagaggcgcccagcttgcggaaaggcgactgcggcaacgcctagtgcaagtcaaccggaggctggagtcactgcaggatctgctgacccacgtgattcgccaagacgagtccgacgccccgtggtcagtgctggggccaaatgcacggcggcctctggagggcgtcttagagaccgaggctctagaactgagccagttggtgggcacgctacaacgcgaccttgattgcctgttgcagcagctgaagggcgcacccccgtgcccctcccgccgctgtgctgcggtggcccacgctctctggactggccgcctacccttgccttggcgacctcatgcgccggccggtccgcagccgccctggcactggctgcgacagttgtcgcgccgtgggcaactgttggttcgttacttgggcgtgggcgcggacgcgagcagtgatgtaccagagcgcgtcttccacctgtcagcctttcgccacccgcgccgcctgctgctggcattgcgtggggaagctgccctggaccagaatgtgcccagctcgaatttccctggtagccgaggctcggtctccagtcagctccagtataaacgtctggagatgaacagcaaccctctgcacttcagggtatcttcgcgccgcccctcgttcgcggttccagtcccctcgaagtctctaattacacctcgcagttaccccttcttggtgatcttgcccccggtaaccctgctagcttctccgatctcgcttcaccacgacctcctacccgctaacccccacttcccacctgccacctcccagcttcctagccttgcctgaccagcttctgacgcccccaggtggagaatggtccaaatcccacggttccagagagagggctgctgctgatcgggctacaggtcctacatgcggagtgggacccaatagctggagccttgcaggacagtccttccagccaacccagccctctgcctcccgtcagcatcagcacacaggccccgggcaccagtgacctgccagccccagccgacctgactgtgtactcgtgtcctgtgtacatgggagggccccttggcaccgctaagctgcagagcaggaacatcgtgatgcatctgcctttacccaccaagctcacccccaacacctgtgtccaaaggagggtccatgtgtgcagcccacccctgtcttgagcccgtctaccaaaataaagttgtagtgattcca

SEQ ID NO: 15552 - DNA, 64782 bp, Homo sapiens
atgagaggtggtcccatcaagaactacgtgacgctggtgagccgcctgaatgtttggcaggcccgtgtctccagtatgcctatcgagttgctcacaaaaggcgggttgctgctacttagctgccatgatgtacaggcagagatgggtgagtactgcttctcttccctctcctccttcccttttctgtatgtctattcacatggcctgccttggtcctggaatgtcctccggagaccttcggtgcaggcctcttattggacctatgaagccttccaaagcccgaggtcccaggccctttcctttgccatcaaagctatgctcactgcaaaggccggcctctctgttttggctctgctcataccctgtattccttaggaatcatgttcctgtgcttgggctactaagctcagtgtctttacagagattcttgggaatctagggtgctttctctctgcatgtagctgagtgaaatttatactacgatttgcatatgtaaaaagctactctctaactgagcttgtcttactctgtagtcctaacttctactggtagtgaaagaatgtaacctttccaattaaagaaagctcctttcatttaaagcagtcacttttggtctgattcagtctatttgggatatctgggcaattgaaaatttatactgtagttctgggttgtttttactttcaaatgtcttttcctcccttttccttcccaaggtgccacctgtactggggaaggccggtgggctggcttctgaggtgtgatacatccttgcctggtctctgccctcctgacattgctgcttctggtgctgctgtgtcctgggctggtagagctgcgatgtgttttcttggactaatagggacctggagtgtctgtctttgctgacctgtccttgtcttaacatttgctggcatagctgatccttggggttttagtgaatccttcatccagtctctgtcttaggctggctacccccatggcttttgcttcagggtccctagcccctcaacacaggaacttcatctaggccactggctatcaattctctgctatcatctatatcccctgccatttgggagttgtgggaaactggtaagcattatatccgcccctctttttactacaacacataacagtatgatttctactctgctgtgactgtttcatgttagcaagggacaccctaaaaggtggtctttcccaaagttctatgtggaaagtggggctcaagaccattctactacctattttctcctcaacccatctcaggttccctcctcttgccacttctacccctgctaattgaacgcccaattgttgctatccctgggtctctgagaaatctggcttatgacctagtcttttaccctcttttctttcttccttcccatgggaaggatatctcatgctattgtgtactagctagtgcctcagcctaggagttcgccacagagaggctcacagcggggtagatttggaagccagtgatttgttcttttaggaaatatggaggttgttctctttcctcacctagcctcaaggatggcaatagccaatagtatctacttcctgtgaagactagatcctgttggacccgtggcttcccaggcctgctttctttatgaaggttagaagccactggggcctggaaagagtttgcttgtatgccctgcttgcttcgccttccctgtcttggctctcaacagatgaaagcacatgtatcattaggtatccagtgggccactaaaactccctcctcttgtacagggggttcaggcgggcaaggcaggaaccgggaggacgtttgattgttttgtcttctctctggccgtgttttggtcaggctttacttcactgctgctgagaaagcttattgttgttctagtttgttagcttcctgatcctcaatccaggaccaactagtctctttaagaggagcaggtggagagaaatgagcactggatttagaaccctgtctgtttttcacttgctttgtaacttcagattactgtgttttagtttctttatttgtaagctgggcatgataacacagtcactcacagggttatagtaaggatgactaagatattatttgcaatactcttagcattgagtgtggcatgcagtaggtgcttaatatttttttcatttcaccttatccccttgtatctactctcatccttcttgctgatctaattttatctaaccctctgacttaactctgtcgtttctcttcttcctgaactcccttgaacaacaaatggcgtaattatacactctgacgaattagcttcaccagaaacttggggtcaccctttactcctccctctccttgaccttactacatccaacctgtctccaaatccttgtcattcttctgccccctaagtatctcttaaatctgtttttatccatctccagcttctaatcccaaggagtcctggtattttatcaatgcattgctcctttataccatacggtgtcactgttgagctcccatctgccttcatctgcctgttgctactggtccaaaagcagcaccataaacaaacaaacaaacaaacaagcaaacaaatgtggcagcattgcaatggcctagttactgttatgttccaaagggacagtgtgaaaaaggatgagtttagatcttcatgttctgtttgatataggttgtccctcaataggcttcctctcagcaggttttcttattatcaggtcttagtacccagtcatcttggttacttcctccaagtctctgaaagtgacatacccagtatgtctcaattatctgtcccccaaactcactattttacttactagttgcagagatgctaatagaggatcggtcagtttactttgcacataacataaaaaatatttttaaatactttttataaacatatatttttatgtttacatttatatttataacataaacatgtttatatttaaaatataatgaagtggagccatgctgcctgagtctgaatccttgctctgccactgtgtgatgttgatcaagtgacataacctctctgagcttcagtttgcttatctgtaaaataatagtatttacttcaaagggaatttgtgaggataaaatataattaaagtacttgaaatagtgtctggtatgtagaaagcactctatactctatttggtgtaccatatttctatattgtatttttcctattctgtgcatattttaacatctctgaactttaaaggtgtctcatgattgaagatgtgttagagtttagatggcatcagttttttttctttgttagtggtatataaaataatggtgcttcttacaacgggatcttagattttatgaggtatcatatgggtgttatccctgccctctgagataataaagttgttcatactgccaagggcagcttccaggattactttctagccccttatccacctgagactttctttactttaatccttaaaaacaaaaggcagatcatactaccttcttggtccccttcttctagagcaagggcagtaagactccaaaaccagaatacttttatgtctgctaggatactctgctattcacaaacatgtcatttccatactgttgcacacactgtttcatctttttggagaattaatactcaacacatccaactccagtgttcccttctctgaaggggccttgcccagccttctcaggataccccccggcacccccacctcttagctatactggctgaaggctccaggcactcacagtggatttatcacactgatttgtgattgctcatttgtatgtctgtctctgcctcatattgtgagcttttcagggtggggaaactttctgtctcattcatttgctctcgtctaccagtatagagcacagtccccagtgcatagcagctgactggacattgagcagggattcaacaagcattaaatgagataattcatggtctgacctgccattcagcctactcccactctggaccacagcactgtccccagcaccccttcttttttatgcgtcccctcacaccttactctcctgtctccagaatccaagctgaacagcataaggaaggacattcttgcacacgtgcaaaatgagtgctggaacctcagtcaacaactcatgacagagctcacagatttcatgcatatcttccgaaccatcaactcagatattcatgccattgcacagtgcacccagaaggtgggctctccccatccatccttcccagtttattcagggcccatcctgctcaaaagctcagcacactctcttcaggtctctgctgagcccccagcagagcttgatgctcttaaactgtgctcgcctaagagatctacccttgctaattcttaccctgtccatgtggccctcaggttcctcatgtcacagggaggccctggtgtgatgagagagttgtgctctctgtgacagtcagatagaaaattgttgccttgtcatcaaggtaatggggtggtgggtgagaagtggacccttcaccagagagatctgggtcagagagagatttgatccctctggagagatccctcaggagagattgcccctgattccagttgattacaaggctgcaactgggtctggagacttcactccaaaaggtgggagttccccttggggatgggaccaaagaggtacatggggttgtggggctgccggtctcatgctgtaattcctgcagttgaatgaagccaatgaacagtacgtcgagctggaggagcgaatggaatacgtacgggcactccacgaactcatccgcaaccactttagcctctttagtgctgagaatgaagcactggacatctcggtgagaaggcaattcggggagtcacccatccctccctgccctcctcccccacaaccacatctactccactgccctctgcttgccccacagcttctggatatgtgggaggcatttcagtttgagaaaagccaggcttcagagttcctgctcagcaagcgacatgccattatgcccaagctgcagcagctgatggcagcagcattggcagagctggaaggcctgcttgcgaaggccctctccggtccctttatggaccccacacaagatcagaggagtactgagcaccagctcgtctccctagagcgtcagttccagaacacagtcagcgacctcagtgaactgcaccacgcctatgccatcttcactggtactgaggatccctgcaccctccattatcactctgtgatagacccttcaactgaagtaagagttggaactcagggttctgtgtcctgtatgaccccaagcaagccttgggaatcacacaccttcactggtgtcttttataaatgaaaatttcaggacaaaaacatcatatattgaccatggcaggtgttgtgcttagggtgggggtatgggggctcacagtctggtaaggaaggcaaacaagtgaatgttccatcagaatgtgatggggtcaggggctaaaagcatgtgtgggagaaatgtaagttctccttatagaacgtagcctttttgtagccctgttcaacacagtcctacaccaggcagcaggccccgaacaagagtaggtcttgatgctctagcagatcacttcctccagccagtgtggtatagagaggaggctactgagggcctcactaatacacaggaggaggccaggacagaactattggtctcaattctttcatacagtggtgcaggtaagctggttcccttctgttcttaaagaactctgtgggctctggaaggagaccagagcaaatataagagccattaccaaacaatggagacaggatctcaggctagagtgcagtgtcatgatcacagctcactgcagcctcagcctcccaggctcaagcaatcctcccatctcagcctcctgagtagctgggactacaggtgtgtgccaccatgcctggctaatttttgtattttttgtagagatgaggactcactttgttgctcaggctggtcttgaactcctggactcaggcagtccttctgccacagcctcccaaagcactgggattacaggtgtaagccactgcgcctggccttccttccagaattcttatatgtatgttggatttactgaatctctctcactcattgcttttatcttctttatcatcagtcattcctttattctttttctctgagttctggaaaaatgttgtgagcttgttttataagcttccatttcctatggtatcactttgtatttctattgcattttaaaacacacattttgcatgtgtatgcatgcttatgtacacatgtatacgcatgtaactgtgtgtttatgtgtatatacatgtgcacacatttgctatctctatctgctgaagaggacatgaagcaaagaaaccccagtagcaagaagccacattgtgctcaggtcttagtttctaacaaacaccattccccattaaaaggaaccagagctccttagagaaatggatgattccagggctgtggcagggtaggtacaagatgaacctaaagtgtcattttataccagaaagtaagaaagtattaaagtgtttaaaaaagtgatgggagcatatcacaaggattcagaagggataccaactggctaaatctggaacaatttgatcaccaaagtaagtacaataataaattctaagctattgaagtaaaggcatttattatgcgtagtaataataaatagataatgagagagaaatgaggactcatgcttacagtaaaatgccaggagctgactggcataaatgtggaaggaaggctggagtgggaaaattattattttgcaaccatcatggtaattaccagatcagataaggatcaacagatgccaaatctagggcaaatttgatgaggagcagaatatttgcactgtctttgagagtttctcccagagatcacttatttgttgtaaaaaaaaagaaagaaagaaaaagaaacaacaattagtggagaaatcagacaataatttgaccaggtgattaaaaattaacatcaccaatgaaggacatagggacatgatctgccttcagatgtgatactggagaaggaaggatacaatatcacttatgtagtagtccagctgagaatgagtatcatttttaaaaaccataaaaacacaacatgaggaactttctatgaacaaaaaaaatggcaaaaggggactgtatacttcaaagatgtctgttacaaaagaaagaaaggctatggaaatgttccagattaaaagaaactaagagacatgacaaatgcagtgcttgaccctggaccagatgctataattgaggcaaaaaatgcaatctaggacattattaggtcaactgacaaaactgaaatatggacagtagattaaaatattgtatcaatataatatatgaaatttggaattgcactgtggttatataaaagaatatccctactcttaggaaatgcatacttgagtatttatgtaacttgcccttaaatagttcagaaaaaaaaattgtgtgtgtgtatatgtgcatacacatgcccatgcacagagcatgtgaatgcaaatgataaagcaaatgggtaaaatgtcaacaaaaggcaaagataaacagtatagatatatatctatacctatggaagatagaaggtacacaatttttttttactactttttcctacaactttgaagattggaactcattttcagataaaaagttttaaaatgcatggaaattatcaagtagatatcacaaaatgtctgtcaaaggacatttgctcttaatccccagtttgtctttatcttttcatgtgtttggagatgatatctctgctctttcttacagatgaagttgtttatttgtctaatatttgatgttgaaacaactgctgtcaaagattgtatgggactctagccatatctttgagtttagacaaagactggaagagtttagatttactgtcattttactttttgtcagatcagagctttgatagcctagtgattccagctttttaatactctgagatctccaaaatggatgatgtgcacatgtgtaagatgcatgaggcccagcatttgggtgtgactctatcactttttgtcccactcaagaaagtaaactggagttcaagttaatgagatatctgttgtcttttaagtaaattgcaaacctcgatattataattattgttaattataaattcctattgacacttatctcacaactgactataagtaactgattaagaactaatgtagtaccctgtgagatgaaggggtggaggataatggccggaggtaaacatgacaggtcctctatgtgggccagatcttttttatattcatcttgctgaactttcttttgggctgacagttcattcgctcattcattcattcattcattcaacacatatttgttgagagactgctgtgtacactaggcttgaggtacatcagtgaacaaatgataaaatgcttttcttaatggacccaaacttctagttgggagagaaagacaataaacaatgatgataaccaaattctgtagtatataagaaagtgataagtgatagagaaaaaaaaaaaatagaacagagtaagaggggttgaaaatgccgggaagggtagctaggaatttttaaccagatagcctgcataggcctcattaagaaggtgctgtctggctaggcgcaatggctcatgcctataatcccagcactttgggaggccgaggcgggcggatcacgaggtcaggagttcgagacaagcctggccaacatagtgaaaccctgtctctactaaaaatacaaaaattagcctgacatggtggtgtgcgcctgtattcccagctacttgggaggctgaggcaggagaatcacttgaacccgggaggcagaggttgcagtgagccgagatcacgccactgcacaccagcccaggtaacagtgcaagactctgtctcaaaaaaaaaagaagatgctgtttgtttgaacaaggacttgaagctggtgagggcatgagccatgtgattctctgaaggaagagtgttccagaaagaatagactgctagtcaaaggcccttagcaggagggtgcatatctggtgcatctcagccatagtaaagcgtccagtgtcactagaatggagtgaatgagatggagactaattaaagaggaactcttccctttcactgccatcacattttcccagatggtctttccctggagtaactgttccttggattaaccccacctccattgttgagccaaacaatttggaactccacctcccccacccccaaccatcactttctggaccctaccttctgtcattatgggctcttgactgatcattccaccacccccctcccaacactgcaagtagcccaggtctcaagtcagccctcccccacagaggatgagactcctgtgcccttgccaatctgtgggacacgtcctattgtgcagcagcagcgcatatggcacctgtaccgagtcatctccgaaaacatcagcgagtggaagtgcatggcttttgccaaggtgctgacacccttccttggagctcttgactgggagtggaggactacagtggtgggggaggggaagagtctcaagctgacagtgagcccttctccctgcagttcagcccagctatggcccaggagaagacagagggctggctgacagaggcagcacggatgagcacaaccctggagctgcacagccccgtgctgcagcactgcatgcgcatcctgggggagtttcgcagctacctgcccctgctcactaagctgggcagcctccacccacagagcctcaactgccagtgtctcctgcgtggtatgtttggttaatgtcagaggagggggaaagggaaatatgtgaggttagagcgatgcagcaactcagtttcctgctgctcctgctggaaacacctttcatccccaagtttctccctacctttcccacatatttcaatttcttttccttaactgggacaaaaatttttaacttcccttactacctcctctctgctgatggtggctgggcttgggctggggccttagctctgggctctgagttgtgctctagaccttgagttctaagctgttggctctgtgttgtgctctgagatctgctatctggggtctgagctgggctgggctgggctgggctctgggatatgggatatgggttggactctgccacatactgggtgttgctctgacttgttttctctacctccagcccttgggctgggcagtctccaaactatagaactcctaacgctgggccagctgcttacttatccactgctggagtttgcagatcgaatcaaccaggtggggccctcagtacaggggcgagggaggtggtccaaagccaggacctgtaataaagccagtcaagggtggtgggtgtttggcatgtgatttaatgtggggttgagcctgctaacctgcctgaagggcaggaacagtttctttaagtctccagatggggatctcttgtgtgattccagactcccagtgactgagagtatgtccctgatgggggaaggaagtgggtggcagccccgaagttgtgggcacacagaatggcaggtgccccccaacacctgtcttgtccccagagggtgcgagctgactgaggtatttgctcagttggagccttgcaaaagtgggtgggggttccaaagcagtggccctggggcaaggtagttagatgctgccgatggcctatctttgaagcctgatggtcccactctcgcttcatctctgagacctccactttcctgagccctggcccttgagttctgcctcagatccaatccccaagtctcggctccaagcctgtccccgaagcagttacccagtcctggttcctgagacccagctgttccaggtctggcagaatgaaaatgaacgaattcatgcccaagagactatacggcggttgcagcggtactgggaagcgcgccagctgcgcctgctcaacttcatcctgcatgtaccctacgagcccccagcctcagagcgctccaagaggcaggtgctccgcagcccccaatgggaggtagtggacaaagatagtggcaccttcatcctctcaggtgagacccagaccttgtgacctagtgaaagccccctgctgggggccattttcatccaccatatccatcaaggcctgccagatctgattctctagccagggccccatccttactagacagcctaagacattagtctgttctgagacagtgtcttccatgtagcccccctactgtcttaatctccttgggatccccttcccctcacccatctctactcaatgcctgggtccttcagcaaaggtcctcccctttctgggtaccctcagaaattcctcatagtcagttatctacacctttcaatgctctgtcctctagattgcaccctgctgtctgattttataccttattcattaattcatttctttattctctccctcatcaaacctgcctcctctgtgctaaacacaggagaccttgagacttacagacagtatccctgtcccccagaaatttctgagtccagtgaggagagacagacaatactatagggataaacacaatggagcaccttactgagggcagtagaatctcagagagaggaccagctcaaagaaccagagagagaattagagaagtcttctttaggcagaggccttatactgactttttgaaggagtaagagtttgccaaacttgccaggtgagaagggcagaccagacaaagggaacagcatttacataagcatccaagatgatatagctagggcattgccaatagaggagaattttcttattcaacgcaactagaacccagttggtgaatccaaaaaactaatgatgcatacatagtttaagatttttattttagcttaaaatacatacatgtacatttatttactaacgttttaacctaatgacaagagcttttgtttgatttgatagttcctcactgcctttcttgcattaatgtattgtctactatttctgctttcactttctgcaaagttgggcagcaacatgaagacacttttaaagtccttatgaagggaagggccttagctgcagaagctgggcactgtgtggagagagggaggtggggagaggacttccaaggagattaagacagtatgggagttacatagaagacactgtctctatgtgacttttccaggtttttattataagttcccaatttataaaaattgacttgcctatacctaatagcatatgtttaatcagtttgcctttactgaagctttctgtggtttccatagaaacagcaactttccccccaccaatgtgtcagtggttgttacaatattagattcaactctttacttaaaatcacaacataactcacataaatagatttgcaaacacactcttattcttagtgcgcacacactttaactagtggaagcaaaaatgtttgggtcttgtaaagaatagcttgaaatctgcgagtttcagttcagttagggctttagtccgtacatttgatggtaagaatggggagcatgaataaaagagcttctatcgctctgtggctggatcccaaagaatagtggaggaggggatggagcagatggaactggagaggatcagatcatgcaaagtcttgtgggccacattaataatttactcaataacatgaaaacaatagagggtcactgcatgttttttgtgggtagtaacataattagattttagtttaacaatatcattctggtttcaatgtggagaatggattgaagggaggcaaggaatggaaattgaaagatcagttaagggatgactggtataacccaagtgaaaaataatagtggtctagatgaggacagtggcaatggggaaaggaaagtgggtgcactcaagctaggcagaagtcagctaggcaagatgtgtaactggttcaacttctgcatagaggagaatgtaggtcctttccattctaatatagatgttccttattacccaaattctttatccttatcacctctttatatccagtatttggtgaggggtgccttttccagccatttgcagcacattgataaatggcacccagcccccttgttcacatcgcccttattaaggactcttaagttttggtgtggactgacacaaaggctggatgtctgcagttaacatttgcaccaagattgaaaggagattgtcttcccacttttgtcctgagcacattttatgctaatccatttgcccatctctgaccctggttccacactttgccagtctgctcctacttgatctctaccacttttctgcctcatccttagatttctctgctactaaaagtaataaataaaaattcgtaatacaaagtaaaggctctggataatgtgggccttgggatgcctgtgggcataatttcagataccagcctgggtcctaccagtctttcctgagctcacagcccttcctccacctttgctccttttcagttttcccttctctctctaagctagcatttgcaccaagcacttgtgtggttgaggtttctccctatgggttctctcctttctctgtaccaggctttcttttcctgttaactccgggcatgttaaccaaggaccacatctttgtagtggccacacaccatgaagctggtgacttcgttcacccaaataaaccccaaatgatggacttgttatatatttaattcttacctcaagaagacaggttgttacaggattgggcacacctacaaattattaatctcccctttagattcttaaccaaatgaggacaaggatatatatgaaaatgaaagtatactatcagaaccatcacccccaaggaagtttgtgctttttatgtatcatgttggcagacacagcttggatctaggtcaagtgagacttcgtgctacctcgtcataatcttcccccaattaattgagaacttgaggtctgtgtggatatgcagagaaaagctgaagtacagttacacaggtagctgtgtagaggactgtggcctgcctcatatcccatagagcataaaagatgggcctctttgcctcctcacatggggaagagtaagggaagaagatagacagaggggctgaaagcattagtccagtgctgttttctctagagagtggagtagaagttgtgtgactctgagagcaggataatgagttttcttcccaccagggatgtttggagagtcctacatgtgtctgaataaacctcctttcttgattcttctcatttttaccccaattagtgtccctacctcatttccagccctagtcttaccaagcacttgtggcatgaagggataactctttaagcagcaccagggagccaagcactaagactatgagagaaaagtttgttctcagcttctctaccaagacccgttttaagacagaatgggcattcttgctatagaaatattacgtagggtcctggagccattcagccctcttcccgggctagaggctctagttcttacaaagcacttccatggagttacgtggatactcatagcagctagtcagggaaattagctggcctggagtctgcccacagtgccttgggaaaggaggagcttcttctctcaccattttgagaccccagtgctttactggctctacatattggctgatggaatccttaaaggcagaaagggcagctgggcatggtggcttacacctgtaatcctagcactttgggaggctgaggtgggtggatcacctgaggttgggagttcgagaccagcctgatgaacatggtgaaaccccgtctctactaaacatacaaaaaattagccggacatggtggcacacacctgtaatcccagctactcaggaggctgaggcaggtgaattgcttgaacccaggaagcatagtacagtgagctgagatcgtgccattgcactctagcctgggcaacaaagcgagactctgtctcaaaaaaaaaaaaaaaaaaaaaaaaaaagggaaagaaaaagacagaaagggcatcagggtctctgtaactgcctctcctggaaggttcccctggtctcctcttctctcccccagccccggcccttgcctcatctgactgccagttcagctttttctgtcttagattacagcaacctgcaggattccatccaggaaagtcttcaggtgttgtccaagatcttggccatcgaaaagtcaggagatttaaacaaaatagctttggagtgggtggccatcatgcatggcctgggtaagtgcaggcctctagccaggctgatgggtgagacctgaggcaggatgtcccagagggatgggggtgagaggtggaggttgggtgggagaagatatgaagaacacagtgaggacctccttcagggctgtttcttgggatgaagagatcaggtttttattcacagtgaaagttttttctccctcaagcaagttccctgagtcctgctgggcagagtattttgcttgggctggtggggtacctgagaggtcaggagcagggtggactcccctgcagaaggtagaaccctagtgtttcccaccagcattcctctggctgcttacacaggtgccctgctggaggtgtggctgactttccagcagaagtggatttttctgaataaagttctgcatgagatgaagatccagtttcctaatgctgacctggtagggaagggggttgaggcagagagggcaagaagggttcctgaatagcagggctcagcgtgggaaaggggagctgccacttcatattggccctcacttttatcctctccctcaccacagaactctcgtttcaaggtcatggatgaccagtatcgaaccctgatgcgcatctctgtagctgaccccatggttctgtcacttgtagtgcccagtgccgagaggagcccttacttccaaggccagcagctgcaacaactgctgcaagcaggatcggtggagctggagggcatcatcatgagtctggagagcgtgctctatggggtgtgtgctcacttcccccgcctcttcttccttagtgacagtgagctggtagccctgctggctgctcgactggaatcatgcgaagcccagctatgggtacgacgctgctttcctcatgtgcatgctgtgagcttcaggtcttgcccaactggtgagaaaaacacagatgactgggagtcaagcccaaacacacagactcaggtggaggcacttgcagtgctaggggcaggtggggaggaggtgaagctgcagggtccccttcctctgcatccagatctccctaagtggctggcctctctggagaagtgtctgcgcttggcactggtgcacatgctgcagggctgtgtggctgctcgccttgctcgaggcccatctctaggtgaggccctcaagcaactgcccaagcaaaacaagttgtacctgcaactgtatgtccagcactggatcgacttagtccaggccttcccatggcagtgtgtgctggtggcagaggaggtggtatggcgggccgagatggaggaggctctgcttgagtggggtaccctggccatggtctccatgcatatgcgcaagcttgaggtactggtgaattttatgcgggcccagagggcttcccaaggtgggcagtccctgccttctgtccgccagaccagccttctcagtgccctgctggtcatggcagtgactcaccgggatatagcacagctgctggaacagcaccaggtcagtgatctcacagactttcactgggtccgccaactcaagtatcacttgggttcacctcacataatccccaaaagccccctacagagtcttaagactattgcatcttctgaaccctctctgtcaccagcggcatgctggatagatgtgctaggcaggtccttcctgtacaattacgagtatctgggacctagactagggcctctacccagcctactgcctgaacggccagccctggtactattattggccctagaggaggtggcctgtgggaccgtactgggtcctaatggtgtgggcaagagagctatagtgaacagcctggcacaggccctgggccgccagctggtgatgctaccctgctcacctcagatagaggctcaatgcctgagcaactatctgaatggtgccctgcagggtggtgcctggctgctgttggagaaagttcatcagctgccccctggcttgctctctgccctgggccagcgcctgggtgaactgcaccacttgtatgccccactgtaccaggaggcttcccgaaacacaagcaccatagaccccacccagccccagctccttggcagtagcttctttgaaaaacatcacgtgtctgtgcgccttggctatggctgtctcctggtactgcgtgccctgagctctgctgtgcctgccaacctgcacctgctgctgcggcctgtggcattggcattgcctgatctgcggcaagtggcagagctgactctgctgggtgcagggatgagggatgccttccagatggctacccgcctatccaaattcttctctctagagcgtgagctggtgtctgggcccctgccctgccgcctgccactgctcaagcagatactggaagacacaatacggacactaaatgtgaccaaggaggaaccgaagtgccagaagcctcgcagcctagctgccattgaggaggctgccctactgcgctcaccactgtttagcattctcaatgggctccacctgcacaacctccgagggctgttgtgtgcgcttttccctagcgccagccaagtgctggcagaacctatgacttacaagctgatgaagccattggtggtggaggaactgcaacaggtaggtctggatcccagccctgacattttggggtccttggaacagttgagccaggccctgagccgggcctcaggcattctgctcctgggccctgcgggcagcggcaagaccacttgttggcacagcttatttaagatccagaatcggctggcagccatggaggacacctcaacccaaggctgccagcctgtggaaattacccacctgtaccccagtggcctcagcccccaggagttcctgggatggctagagggctcctgctggcatcatggcatctttcccaaggtacttcgtgcagccggtcagtgtaacaacatgggccaaaagaggcagacagaggaatcaatcgggatccagcactggataatatgtgatggagcctccaatggtgcttggctggactccatcacttgcctcctgagtgagcttccccagcttagtctccccagtggacagcagatagcacgacccccaggcacctttctcttgatggaggtggctgacacaacaggcatatcccccacagtggtaggctgttgtgccctagtctggtgtggtggagagcagacttggcagtgtatacttagtgccctgatggcatcccttccttatgagtaccgcctgcagcaccggacagtcgctgagctcaaccacatggctgaggttctggtgcctgcaacattgcgattcctcacctgccaaggtgtcagctctctgctgcaggtacacgggcagcaggctgtttgtgcaggtgtggcagaagttaccagcatggcacgcatcttgcatagtctgcttgacctccaccttcgcctaaaggaggagaaggcccctggcccaggtgggaagatggacgggctggtttgagagagatggggccttaagggtagctggggtatatagctggagcctggggcgtgtgttctttggtggatctgggccaggagtgaaaagtaatactgtcaaccttttttctttctttcaccttccacctttttctactggggctcctctcgtggccatggcaactttcacagaggacctcagctatagtgatcctgtggcccaaagcttcaggtcttcaaaaagcagctttctaaaccggtcccaggttgacagtgacgatgtgccagataagtgcagggaacacttgctggctgtcagcagttttctttttgccttgatctggggctttggagcccaccttccctccaggtacctaccaggatgggggatgggagatgcagagggctgagatggactggcccatggaagtaaaaacccacatgacatcactgttagggtatggtggagtgtgtgagtgtgtcataaatggaagtgttgtaactgtctgacgcttttgcctgtgtgtccatctgagcaggttctggcccatctttgataccttcataagggattctattagtcgcctctccaactaccctgagccaccaccctcagccttggtgtttgatctacatgtaagccctgaagatggaacactggtccccttcactggccaatacctgagcagccacatcaaaggaactttgggcacctttcacccttctatccaggtgtgaggacagtaaggcaagagctggggttagaacttcaggacttattttaggggtaatccatgttcaaagatcagctgaggcccacttgctccctttctttgatatattttcacaatcacaagaatacatgaaatattttccaagtacagctctaggacaagtcccttagacttttattttcagctagattactgtcttatactggaggtgctgcagtaagtcccacttctgtcttgcagactgaacggctcttgtatgtggtggacctgcttctgtcagggggacagccagtgttgctggctggagaggcagcaacagggaagtcagcctttgtggaggtgctggtagagccacatcacccttacatatacagccccatccaccctgccttcagttcctcccacctccgtctcctgctgagcagaggaatccagggccaaacacaagccagcccacagcctgggcatcaccaggattctaaaccctccctcctcttcttgctggaggacctgcacctagccacttctggtgaggagctgcgaagagggaaggaaggagctactgtcatctcttgagactataaaatccctagcaatattcattgactctcaaatatatgtctgtagatctaactttagtgttctgttcttaatatcttctcattctacatatgctccctgaacaatcccatccactctcatggcctcatctctgctttgctaaatctctgtgtccaatctcacttcttttctaagcaccagatctgtctatccagctgtctactgtacgtctccaccttgttgtcctgttggtacctcagacccaaccctgagctcatcatctccccgcggccaaaatctgctcctgtctgtcctcttagtttcaccatccagccagtcatgtaagccagaaatcttgttgacatctcattctccttcaccaatatccagtcaccatgtcttttcaatcctacctccttcatatttcttgaatctttccacttatttccatggttcagatgatctttacttggaaatctgacaaatgctcttacaaagctttctgtgatgaggctttcttctgtgtcctcttacactctctctaattggacttaacaagtcaggcttcctctagaccctgggattgctgtcctctctgccttctctatgtggctaaattctacttattatttctaaattacctaaggcagtagcttctccaggaagcctgatccataggctcggttagatatccatcctgtgctctgtacaataatctgtgataaccatgattttattattgtatgcttgcctatctgtccctttcaccacacttggagatttatgagaacagagaacagaaatttgtctcattcattttggtagacccaacaggaagtaagtgctcaataaaagtttgtagaagacaagataacaaaggaaaggagaaaaatcttgataaaaatttgggatattgaagtgtaaagtttctaaagtggtatgcctctagatgatgagagtttctaaatatggccatgggattgggaagtgaattttaggtagaggttgttggagtcaaggaagtcaatgggctgaagcactggataggctatccagttaaacagcgaagtctcttatgagatgtagaaaacttgaaccagatgtattcgtacttaataatagccagtacaatttattgaatatctactatgtgctctatgatatgtctatgtcatcttcagtgctcataaaagccaagtaagatggggaatttttgcaattattttaaagatgaagaaacagagacagagattttagaacttgcccaagataccctagctatgaagtgtcagaaccaagattaaaattcaagtctatttggttccaaaacctgtagttccttccagctatattatttggtctttgcaatgaatttgcacaaaattagagacaatagaaggagtaaagagtggtacagtcagatatatgaagagatttcagctgagaagagacttcagcaacattgtagagtgaagaatattactgctggcagaatgtaaaaggtgtccttgagtgacaaccaccagaacatccagtataaaataaaaaataaatagacatgccaacaaaaacccccagaaaataatgtgacctgctgtcaagaagaagcaagcaatagaatagaaactgaccctgagatctatatagctgtacgctgtccaaaagatgcactttaaatataaaaacacagatagattaaaagaagtttttaatgcaaaatatttactacagaaatagtttgcataaggaagttgatgtggcaatattaataccaaagcactttaagacaaaggatattaccagagatagaaaaggacatctcataattgaaagattcaactcatcagaaagacaaaagtcttaaatgtgtccacacctaaaatagacatttaagtatagggaaaaaaagccaatagaaacaaaagagacatagtaaatctgaaatcatattaagaaattaatatgcctctcacaataactgataagacaaggagcaagaaagtagggacattaaagatctgaataacactagcaacacactgacatttacaaaacattatactcaccaactgcaaaatgcaccttcttttcaaatgcacatgaaacattcaccaagatagaccatatgctgggttacaaaataagtctcaacaaatttcaaaggattaacattttaaataatattttatctgaccataacaatacaaatattgataagatgcctagagaatttccaaattctttaaaattaacacacttctaaataatgtaccaaaaaagaaattacaagagaaattagagaatgttttgaactaaataataatgaaaacaaaacatatcaaaatttgtgagatgcaactaaaggttatagctttaaatatctatcttagagagaaaagcttggaatcaatgacctaaattttcagcttaagactctagaaaaagaagagcaagttatacccaaagcaattaaaaggaaatcaataataaagaacagagcagaaatcagtgaaatagaaaaacatacaaacaatggagaatatcaacaaagccatattttgtttctttgaaaaagataaaattgacaatcgcctattaacacaaatcaagaaatgaaaaggaaaacataaattttgaatatcaggaatgaaagaggttttattaaagatatttaaaaggataaaaagggagccagggccgggcactgtggctcacgcctgtaatcccggcactttgggaggccaaggagggcagatcacgaggtcaggagatggagaccatcctggccaacatggtgaaaccccgtctctactaaaaatgcaaaaattagctgggcatggtggcatgtacctgtaatcacagctactcgggaggctgaggcaggagaattgcttgaaccagggaggtggaagttgcggtgagctgagatttgcaccactgcactccagcctggtgacagagcgagactccgtctccaaaaaaaaaaaggggagccaggcatggtggcatgcacctgtaatcccagctactagggagggaggcttaggcaggaggatttcttaaggccaggagttcaagaccagcctgggcagcatagtgggaccctcatttaaaaaaaaaagttttaaaaaatggataataagggaaaattatgaaaaactttatgctaataaatttagcaacttaggtgaaatggatacatgctgtattagtctgttttcacactgcaataaagaactacttgagactgggtaattcataaagaaaagagggttaggccaggcatggtggctcacgcctgtaatcccagcactttgggaggctgaggcaggttgatcccttgaggtcaggagtttgagaccagcctggccaacatggtgaaaccccatctctactaaaaatacaaaaattagctgggtgtggtgggggtcacctgtaatcccaactacttgggaggctgaggcaggagaatcgcttgaacctgggaggcagaggttgcaacgagccaggatcacgccattgcactccagcctgggtgacaagagcaaaacttcgtcccaaaaaatatatatatataagtaggtttaattgactcacagttccgcatggatggggagccctcaggaaacttaaagtcgtggcaaaaggcgaaggggaggcaaggcacatcttacatagcagttggcgggggcggggtggggtgaagagatgtaccatcagaacttatgagaaattgctcactatcatgagaacagcatgggggaagccggccccgtgatccactcacctcccaccaggtccctccctcaacatatggggattacaattcaagacaaaatttggttggggacacagagccaaaccatatcacatgccttacaaaaacataacttgtcaaagcttgaacaaaagaagaaaaataatagaaaatgaacagcctcatacctaagaaaagtttgaatgcataataaatgtttccagtcccagatggttatacagttgaattatatcaaatatttagaaaaaaagtacaacttatatatactttttcagaaaatggagaatactaagccatgatgaagacatttcaagcaaagaaataaactgttatctttcataaacctaaatgcaaaaataaatcctcactgaaatattattaaataaaattcagcaacatacaaaaagaataatatcttaagaccaaacggagtctatcctgggaaggcaaagctgactaaacattgaaaaatcaatcagtgtagctcacattaacagaataaaggagcaaatgagtaagtaatattagtagataaaaatcacttgacaaaattccaacactattccataactcccaggaaactaggaatagaagataactttctcaatttgatgaaaagcatctattatacttacagctaaatacatacttaatggttaaatattgaatactgtccccctaaaatcagttaaaaggcaagaacatactcactgcttctattcaacactgtactggagaccacatcgacgcaattaagaaaaagaaataaaagcttttaaaattagaaaagacaagttaaaactgtctgtattggcatgtaatatgattgtctacatagagaccccaaaggaatatttttttaaaccccataaaaaactactacaataaataagttaattcatcagggtcacaggatacagaatcaatccattgaaatcatttgtacttctatatcctagtaacaaaacattggaaattgaaattttaaaatatcacttaaaagtcatttaaaagcataaaatacttaggaataaatttaattaaaagcattcaagatctgtacactgaaaatgactaaatattgctgagatagaggaaatgtaaataaatggagaaatatatgatgttcatggatcagaagagtcagtatcattaaggtcttcattctcccccaaatgatctatagattcaatgcaatgccaagctaaatcttaacagatttttttttggtaagttgacagtcttattctgaaacttatatagcaatgcaaaagatctagagcagccaagcaactttgaaaaagaacaaagttgggacacctacactagtgatgttaaaacttgctatacagttgttgtaatgaagagagtgtggtattggtataaggatatacatatggactaatggaatagaacagaaaatctgatatatagtcatatgtggccagttgatttttaataaatgtgccaagataattcaatgggggaaaggatagccttttcaaaaaatggtgctggaacatctggatatatgcatggaaaaaaatgaaccatgtattctacctcaaaatctagataaaaataaattataggtggatcacagacctaaagctaaaactataaaatttttagaaaaaaattggagaaaaatctgtgtgaccttggttgggcaatgatttcttgggcacaaaaactaaattttatcaaaattgaaaacctatgcccttcaaaagacactgttacgaaaatgaaaaaaataagctattgacagagaaaacatgcatgatacatgtatctgacaaaggacttgaacctagaatacataaaaaactcttacaactcaataagaaaacaaacatcatcccaatgttttaaatggacaaaagacttacacttcacaaaagatgtatgagtgggcaacagtatacaaaaagatgcttgatattatcaggcatcagtgaactgcaaatttaaaccaccatgtgataattaaaaagactgacaataataagtgttttcaaagatgtagagcaactgaaactctctcactttgatggtgagaatgtaaaatggtacatccactataaaaaatatatgccagtttcttacaaaattaaatattacttaacatatgacccagcaattccactcttaggtattcacccaagtaaaatgagaaccgcatatcctcaaacttagtatacatgaacattcatagcagcattgttctgtataatggtaaatccacatctccacccaaatggctccaggtggtggcaagagataagagtttagaagcgcctctcccacccagcagactagctccctgctttgcctcctttcctttaaaaacaggccattcaggcatttgcctgaaaacttaaaatgacccacaccctattcccttacatatactgccagtccctccctccatccctcctctcctccctcattccctctctctctgtctctctctctgtctctttctctctctgtctctctcaatctaactcttcattgctgcctcaggtgacatgaggatggaggactgatctcccggctcattatgccctccttgcacaggattaagtaaaaatctttgaacttgtttcctattgttgtggtgtattgaatttgtccttctatctaaagaaccagaataagttttctgtgtgaaggactctctggtcacaggtcagacaactaggcattaggctgtccatcagataaaagaagtatcctgtgaaaggcacactgtaaacccccacactcagctcccctttatttcctgttagggcagggttgttggctgctctggtactagaacaccagtttaactgggggctctcagaaaaatactactcaggaataaaatggaacaaactaaggaaacacgcaaaaacatggatgagtctcaaaaacctgctgagtaaaagaagatagacatgatcaagtacataccgtatgattctatttatatgaggttctagaacagacaaagctaacctatagtgatggaaatccgatcaaataacaatgcctgtgatggtggtggcagagggattgattggctttaaaggagcatgaggaactttctagggtgatgaaaatgttctaaatatcattggggtggtgatgacacaggtgtgtacattagtcaaaattcactgaactgtacacttaaaatgtatacattttgttgtatgtaaatcatgtcttaataaaatttatttttaaaatttattattattattatttttagagacaaagtctcactctgccactcaggctggatggtgcgatcagggctcactcaagctcttgtgctcaagtgatcctccagccttagcctcccaagtagacaggtctacagcacacatcaccaggcccagctattttatttttcattttttgtagaaacaaggtcttgctatgttacccaggctggtcttgaactcctggcctcaagaaatctttccatctcagcctccaaaagtgttgattacaggagtgagccaccacctcccagcctaaagttgatttttttttaagtgcacatgtgatataactgtattctctttgactgaaatgattgcgctttcctgctaattgtgatcgatctggtttctatccttctcagcttccaaatcttattattcattaaccttcagttaatgattattcattattatcattattaaccttcggttaatgaataataagtcacagaggtaggatctagggagaagagagaagaaattcctcaattttagggagaatgtgggggagggagaatagcttactcaaatgtgaccaagtcccaacacgtcagattcacaaaattcctttagaaccgtgtgtggcaggaatagagggaacaggttgatactctcatgtggacttttacatgtcctcattattattcctcatgtcccatagacccagagaagagctgccagccagtgttggagactctgcgccaggccatggatggcactgtgtatgcccacagcaccttggaactgcagacgctgcagcctacagtcaacttccttgccactgtcacagtgccaggatactgtgagcgcccactgtgtccacgcctctttcgactcttcacagtcctggccctggaaagcatgacccaggccaccctgctggaaagacatgtgcctatcattcaggcttggcttgagcgtttcccttctgtggaacgggagcgtgctctggcacgaggtctggttagggcctcagtagaggcctgggaggctgtgtgcaattgcttcatgccttcacccctccacccacactaccacttctccctacactctgtgagccacctactgagcagcctgcagctgctgcccaacagaacaggctcccgaggttttgtggactatcccaaccaccaggagcacttgcgccgggtgtcaggcctgcgaggcacttgtctgaccgttatgatggccacacgcaatgtggtgcgtctttggttgcatgaggcacagagaaccttttgcgaccggctggacagccccagggaacgctcctactgtgccaagctgctcctagtagtagctcaaagtgtcttctgctgtgggccagggccccagcacctgggcaaggaccatcaggagagtgaggaggaggaggaggaggagagggtgcccgaagtagaatctgaaggggagttggcccagtgggaggacttcagcaacagcaatagtgaaacagaggaggaagaggaaccttatggccttcaggtcgccagagtctcaaactccagagatccaagtctaacaccatccataggaccagtaagcagggggatgaaggaaagcataagtcacaagataaggcaagagaaaggcacaagggcatccaactataggctccaggtaaggagatcattcaagacttggtggcagaagaaaccccagatggacctgatctcacccttgttgttaccagtgttactactacatccccaggaaaagccctcagacctggtcttcagtcaggagctgatactggggcctaactctgagacccccaacttgtacctggaacgacagtgggagaagctagaggagcagttggccacctcagctgctcaactgaagttgagcccccacctggcccggtgtcattccatggcccagcacgtggcccgcctggtccgggtgctggccaggccccggcagcatggcctgctgctctcgggggctctgggtactgggcgccacactgccatcactctggcttctagcatttgtcaggcccatttctttcatctaccatctgggtcagaggaggccattctccaatgtctacgagatgccagctggcatgctggcatgttaagccagccagtggctctgttggtacccagtggtgtggatctcactacacttcatcgcctcctggccctggcaacctcaggcagtttccctggccagtacacagaagcagatttggaccgcattggagaacacctccccagggagaaccttggtgtcaaacagaacatcaagaaggaaatggtgttgcagaggtgaggccaagaaccccatatgcgaatctgctctgctcttacgctgtcttggccaaaaggccaaaaggaattctgtgggctgccatgagggctgagaagattggggctaagtggtctggctgggactggggccaggaggggcaagcaaaggtaaaggggaggacattagctgagccctggcccacaggttccaccagcaagtgtgcagccaccttcacctgttcttcctgattggagataaacaggcccacaagcagctgccctccacccttttcctgaggctccttcaactggccactgccagcattgaccgctatgaaccctgggaccaagctgccctggccaaggtggcccagcatcacctggagggtgctcagagtgtgccccttgatgacggtaagccctttttacttgtccttaccactcatctctaccaggctctaatgagggttattacctaggtcagtctctctctctccctctctagagcctacagagcccccttcacatttcctacccttcttcctgagctaggagaggatccctttcctttcctgttttcctacaagctcacagagtgaggctaaagccatgcccattgcaggctcctggaagtacccagacctccaggcctcaattcccagtgtggccaaagccatggctcttatccacctttcggccacccactaccatgagcacctgtgccctgcattgccactcgtcacccccaagaccttcctagacttcctggacactttcctgatgctgcagcaacagacaatcctgaagattaagaacaaggcccagcggtgagtgtcccgtcccctgcagtgtacctccttctgctcctttgggtttcctcaccagcacattgtatctccagggtccagaatgccttggagaatctgagaatgctgattaaggagcacggtacccatgccaatctgatctttgacttggaacagcagctgaaagactccggcaaggtaaggagatgattttgaggcttccatggtggtgtcaaagcaggagcccaaaggggacttgaaaggaagcaaccagaatgaaccttaattcttgtccccctaagcttcccctttccctaggaaatctctctgatctccgctgcctcctcctttacagcttaggttcaaaagtttcccatgatacagctaagaccagattgattcttcataacaggtgaaacccaagcatctgcttctggctgcccctagtaccatgatcatgtgaagttcagtatgctgccaagatctctgtagattcccatgggggttggggcaggcattacatctcagtcaccactcactcacctcttagagttatcctctttttccataacactttgtccccataccctttcttccacaaaagcaacaaacaaaactgttgtatacagtgaggacatgtagatgggtgatggcagcagggagaaatttgtattatggcatagaaccagaagtaaatttataatggtatactagacaagagtgtcctgaattgtcttactcaccctcctctaccaggcattttccagtgaccaacttttcctttcctctctcgtctctctaacacctgctctacaatgtttttgagccgtcccatttttcctttagcgctcccttctagttgaaacctcaaaaccttttgctgtcatacagaacaatcttattctttgaataaacaaacttcttatatctggctaaaattggtgatgatagggcttatcacaccttctaaagccaaatactcctagttaaaggtgtcttcccaaactaaagagcagttttgtttttaataagaagaattctaaaatagcacctttttttcctactacacaagatgttgataaatattctggtataacttcagagcagtgaactagtgcccatctcacactcagataatctttctactagggtttcaggtcttaagctcctaatacctagccagctcttctgataagtgcctttaggactatcatccagtgccacacaactccagagacatggcatatgtcgtgtctactaatatggttttcactgtgttttacataaatggtatcccctggagttttaaaggtactggtgccctcctactattcaccacctaggatgaacagcttagattagacctcaagactcagttaagttgcaaagaaagaaaagaaagtcagagagcaacagaaatcccctttcccagttttttgccctacattttcccaagatgattaataccaggattgttgatctggtttaggggtcctagtattccttgatctgtgagtcagttacaccagagcagaacacagtaagccaaaggtctggataagagatgttcgtagtctcagggtcattcagagtcagatcccttggtcgttcattcaatagccataatagtgtgtacttcttccagtgttccccaccccaagaaaaggcattaccacccactgagccaaatcccaggactcattctgggcccctccatctctttactctcttatatttaactggttaattttttcattattgcactcaacaaaaatttattttttgttcaggcatttcttaatatttatgtctatgtcaatatatgcctacatttacatctagatggatggatagatagatagatgatagaatccttgcccacacctttctgaggtagctattcttttctcactttacagatgagaaaacaaagatccagaaaggttagggagacttccctaaccttataaggttgtgatgaggattaaacaagatcttacatgtcaagtatttaaatgtgctggcacatagagctcaataaatgttagttactattaatattaggttaggccaggcacagtggctcatgcctgtaatcccagcactttggaaggccactgccaatggatcacttgagcccaggagttcaagaccagcctgggcaacacagcaaaacactgtctctacaaaaaattactcaggcatggtagcacctatctgtagttccagctactcaggagtctgaggtgggaggatcacctgagcctgggaggttgaagctgcagtgagaaatgattgcaccactgcactccagcttgggtgacatagtgagaccttgtctccaaaaaagaaaaaaaagaaaaaaataggttagattgcttcctaataagaggagatagggcactatccttaccttcatggtgcttatagtttagcagaagataagaagatatagactcatccaggcaatgacaaaaccgtgttataacagagtaagttcagagcactccaaatatcaagaaaaactttctagagaaagcagagtgccccgctgtgcagcacagagcgtgtatataacatggtaggagctcaaaaacattcactaactgtataaacaaatgaatgaagtacatgacagttgatgcctgaaagttaggtcagatctgatcagtgtttgaaaggggccaagtgacagaatgtcccaggttgatataacagcatgtgaaaggcctagaggcaaaagagtgtgtgccacattggaggaactgaaagtcaggaatggctggaaagtagcgtgctaggagagagaaaagagatgagattgaaatgatgagtaggggcctggtcatgggggtattgtcaatcaaatgtagaagtgacaagtgttaatgacaatgattcagtttttagaaaaccagccaggctgcagtgggggaataaaaggagggaagtaagagtggaaactgagagaccagttaggaggccagtgtagaaggtcgggagtgagagggcctgagcatgagtgactgacattgggaagggcagtggacacgagaggcatttaggaggtagaattgaaaggtctcaaagatgggctggatttggggggattcaggagatggagccaagggtaacaactcagtttgttccttgggaatcttgccaccattctctgagaaaaagaatacacaggagaggagtcagattgcaggagagctgaggacgcataaccaatacattcatttggggacatgtggagtctgaggggcctgtgagacccccaagggaagatttccactaggcaaatgaatacacggtatggggcagggagggaacctagctagagagagagatttggcagttggaacgtaagtaggaatcaaagccatgagattagggagggcatttagaagtgtagagtgagaagagaaaggaggctctgaaaaaattgatgaggaatagttaagggctgacagaggaagagaatgagaaagagcagccagagaagttagagaaagcccaaggagaacacagtatcatgaaggccaagagaggaggatgcctcaagagggagggaactgtcttctgtgacaactgctgctaatgggtcaactaaaatatagagtagtgtaacataactgttacacgcatagtcttcgggtgaagcggctgcagaaaaagcaaccacacacttggggctgcgttactagatatataactcacagactaataagtgacagacccagagctcagcctctctctgtggcctacttggagttcaacgtggtcagtctttcaagtgaggagtgtgctacagttccaggatcatagggtcttctggggtttcccgcgtggcccaagatctggagctgcagggcctggatctgtctctgcagagtctcagcatgtttcagcagcagctagagcaaagcaagctcctatacaagcagcagctggaagagtgtcggcatcaagagaacctcattgagaacctggccaggcaacgggatgccctgcaagctcagcgagaggctttcctggagcaggtgggctcttcctgccgcctgccctgcactgctcctctctcaaaagagggcaacccctctaaggataccaagaggagaggatggagtgactcatcatggaatctcctggggggaggggacaaaggtaataggatggcttggggagtggcctctcatggggactccaaggagatgattcccctaaaaacaccttgaaggaagaacagaacatctcaggagctcacttcagagggtatctctcctcatttagatgagcaaggcatttctggagcctctgagccagctgcaggtggctgactttgaggagatacggagctatcgagcaccaccagaatctgtggtccgggtaactgatgcaatgtgtgacttgttccaccatgaaacaggctgggccagtgccaaacagctgttatgcactgaggatttttatcaggtaggaagggtggagcacaatgaaggaggataggggaggcataaagggacacttggcaaggctaaactgttgggtcaaggtccagagcatccgtggcttccccatcccgttaacatacatccttccaggagctggtgttcttccccaaggagaagataacagactcagagctgataaagttacatctaattctgaaggctccaggtatggacgatgcagccctgcgggcagtgagccgacctgcagccagcctggcagcctggctctgggctgttctgcactatgggctggcgcattgccggggactgcccacggacctgctgctgcagcaagtggaggcaacactcactcgggagcaggcccgcctgggctactaccagtttcaggcccaggagaccctggagcataatttggccctggctaagatggtggaggatgcccaagcttcccacaactgcgtggcaaagaccctcagtcaagcacagtgtgggcagtatcacaaatggcccatgaaggctgcactgctcacgcctatgcgtgcctggactacacagctccaggtaaccatccccctcccagatgtctcccccaaagttccttttatgccgttcgcctgctcctccctgtgccctcactgcctccctctgtccctctctgcactccttgccgtactttcctccacaccccaccttgccctccctctgccatatctctgcctgcaccctcctcactggcctacacagcctctggtcttcccttccactccagaagctgaagggacgctgcatgactgtgtttggagataccctcctatgttcagctgccatcatctacctgggtcccttcccaccattgcggcgccaagagctactggacgagtggttagctctgtgtaggggctttcaggaggctctgggcccagatgatgtggcacaggcactgaagcggaagcaaaaatctgtcagcataccaccaaagaaccccctgctggctacacactctcccttcagtattctgtccttgctgagctctgaatcggagcagtaccagtgggatggaaacctgaagccacaggcaaagtcggcccacctggcaggcttgcttctgcgaagccccacacactacagtagttgccgttggcctctgctgcttgaccccagcaacgaggccctcatctggttggacccgctgcctctggaagagaatcgatcttttgcgccagccctcactgagggtagaggtaagcaggcataataaatgcaatgcttccggagtatctgaactgcccaacactcagcctcatgtggtctttcccttcataatgaggacactgtatttttgtgatcaggatgtcccagatttcaccagcctatactataggaacaaatttggtcacatttattttttctctttattacaatgattctgaatctacatgactgattggtccatgatcttccacttccctggtctactcagcactacccaaatttatccaatgttcagaaatcctggggaatatttctgttggctctgtttggatcggggacccatctgggtggagtattggaaggaacattttctaggaaaaggaatagagtgtttattccccagaagaagaggctggggattgagtttgtgagaaaaatgtgaccttatttggaaaggggtcctttcagatgtaattaagttaaggactttgaatgagatcaccctgattcttatccggatgggccctaaatcctgcaagtgcccttacaagaggcagaagaaaaggcatagaaaatacagaagagaggctatgtgaagacagaggatgaataggatccctccctggaattttagagtaataattgtgatagccaacatttattgagtgctcactacgtgcacatctaagtgttttctatgtatcatttcatttaatcttcacagtaaccctatgaggtcgccactaatatcaaccccattttgcagataagaaaattgagtcatagagagcttaagcaactttcctaagatgtcttcctgcagaccttccctcatgaaatggagcccttcagtgaattcctcccctaaggagtctgattcctcccctaagaagagctcctctgaatctttctgccccagggaaaggcctcatgagaaatcaaaagagagagagtaaaacggacatgaaagaggaagatgatgagagtgaagagagtaatgaggctgaggaccagacaaaagagcagaaggcagaggaaagaaaaaatgagcaggagaaagagcaagaggaaaatgaagagaaagaggaggagaagacagagagccaggggtcaaagccagcctatgagactcagcttccatcccttccctaccttagtgttctttcaggtgctgacccagagctgggttctcagctccaggaggcagctgcttgtggtgagagctggtccccacccaccctggcccctttttgacttgccccattctgtgaccccacaggcctcccacacctcagtctaacttcagttcccatccttcatcccaggcactaactatattgaagcgtcttgtgggaaccctcctatcagccacagggaagctggtcagagccagacctcgtgcctggggaatggggatcatgggtgctggcattgtgggtagggtgcctttgcctccctctcacaggcctgcctgtgttactgaccaatgtggagctgggtctagggtgcgaagaactgcaatggctgctgcaacgggagcagctgagtccaccccaggtgcagcctggcttctgtctgtatctcagcaccaccctctccctctgtgccatggaaaaaggtgaggcccagagggcaaattgccagcacagttgtgtggacacactaggccctcagcaccagccctaagagggcttcactcaacctggcccagagcaggcacaggtctatagcagggagccatactccctgtctactctaccccctggctctgccaaggggaagaggttaagcatctcccatgttaccccaagtgctaggttgtgaactgctaaaggggctgaatgtgttggatctgggcctgaacatggaaatactggaagaacagatgctgcatgaaatcttgtgcagagagtatcctgaactcgagacccgctggcaggacctaaagatcagagccctagatacctgcaaggctgtggaggctgctgaggtgcttgggggctcagtctgtgggttgagatgagcattggatggacctgggtaagggggtggagatgaatgtagatgtttggggtctgtgggaaagggccagatccatccaacaaatgagtgtatgcaggagcggctgctgacgatgctgctgttccagaatccgaagcgtcagaagccagccaagtttctgcggaacatagtgagggcccaaggaaagctatgccagctgcgtgctcattgtgaagagttagaagggcagaaactacaggagatggtattgtgggcaccctatcgacctgtggtttggcatggaatggccatggtaaaggccctaagccaactgcagaacctgctgccacttttctgtatgagcccagagaactggctggcagtcactaagcaggctctggacagcatgaagccacgtgagattaatcacggggaggacctggccagccatctactgcaattgagagcacacctgacccgccagctgctgggcagcaccgtgactgcactgggccttacccaagtacccttggtgggtgcattgggcgctttggctctgctgcaagcaacagggaaagcatcagagctggaaagactggcactctggcctggactagcagcctctcccagcacagtccacagcaagccagtctcagatgtggctcgaccggcctggcttgggccaaaagcctggcatgaatgtgagatgttagagctgctgcccccatttgttggcctgtgtgcctccctggcaggccactccagtgcttggcaggcttacctgtcactgtcatccacagtgctgggtcctgcacctgggccagggcctgagccactcagcctcctccagaagctgatcctgtggcgcgttctgcgacctgagtgcctggcaggtgccctggcagacttcaccactagcctcctgggtcggcccctggatgaaaacacgtatgctcccaccatgccctttaaacatagtcaggctactcagcccatgctgatcttgttgccaccgcctggccacccctcagccactctgcatcctctgactgtcatccagaaactggctgccaagtatcagcaggtttgaacctagtttcttggccacagagtgaccaggctcctgtgggctggggcatgggggaccccctccaagcattttcatggatctttctgtactacgtagggactttggggatcatggtagcattagtttgggtccctcgggtcaccctaggatcactttgagtcatgctgccatctcttttttggtccccaggggcagaagcaactgcaggtgatagccctgggctctgaagcctgggacccagtctcagttgtggtcagcactctatcccaggctatgtatgaggggcactggctggtgctggacaactgtcatctgatgccccattggccgaaagagctgctacagctcttgctggaactgttaggcagagccaagggtgagtttattgcctagattggcttccaggatcctatcctacacttgggccttagcttgaaatctcaggcctcatggccagtgacctagcaccaaacttgtccacttggccttgtatctgactcctgacacccctagcctcaagtctgattcctagacttctgcctgaccctttatccaaggactgatctcagacccttgtctgactctagtggttgcagacctggaatcagaacagcttttagaccaacctgaaagcaggaatgtaagcactgttcacagagattttcgtctttggcttattgtgcctgcagagtctagtgcttctttgccaggtgaggagcttaaccccctacaggctctcaaattggaagtgggagggcaactgtgctgtgctgactcagcactctccttcctccccagctgtgctgactcagcactccatgcctgttttctggaaccagtccctggagctgggccatgttttgattgacagtgtggagctagcccagcaagtactctacatgcaaccccccacccaggcactacctctgctcctcctccatggcctcctgctacaccggcagctctatggaacaaggctgcaggcacacagggggcgctggtgagggacccccacccattcctgctcagtcaatcactcaacaaacattgagtatcttccatatgctgggatgagtaaaactaattcatctttggaagctccaaagagcaagggcaaggggaagtcaaggaaggcttctccaaagactttgagattttactttgaattgagtcttaaaagcagaggcaaatcaggtagagatgggcctttctgagcagagggacctaaactcagtagaagggaggagacttgagtgtggttgacgtggacatgctgggtgttgaggagggagaagtaaggttcattataaagggcctttaagactagggcaaggtaggccaggtacagtggctcatgcctgtaatctcagcactttgggaggcgaggcggatggatcacgaggtcaggagatcgtgaccatcctggctaacacagtgaaaccccatctgtactaaaaatacaaaaacttagccaggcatggtggcaggtgcctgtagtcccagctacttgggaggctgaggcaggagaatggcgtgaacctgggaggtggagcttgcagtgagccgagattgcaccactgcactccagcctgggtgacagtgcgagactctgtctcaaaaaaaaaagactagggcaaggtgcctgattttatcctgaagacagtgggaagccactgaagggttttaagtagaagaagaaacaatatcctttttgtgtgttggaaggatcactctggatgcaacatggagaatggatcagaggaggcaggactgggggcaagcagagcagctttaggagactctggaagtctccagggaagagattgtggtatgggtagtagggtagtagccatggaagggatagagaataaatatggggtgaagaggaaggaggtgtcgaggatgactctcagatttttgctttagataattgggtggctggcggtacctctcactgaaataggaggtggaacaggttttgtggggggaaatgatgatttcagttgaaagcaagttgtatttgaggtgccaagtggcaatgaacccgaagctcaggagagaggtttgaactgaagacaagacttgacagtcctcagcatatagatgatatgtgaaaccctgctttccgctccccttctctaggagtcaagtgactctaacccaggttcttcagacccaagaccagctgtgggcaagtcttagcaatccccgtgctgccatgcaagagctggctggtgagacccttcctctcccccttggagtcatcagcccccaggagagcctggaagagggtgggggtgggatacaattcacagctttggttttggcggtggtggaaactgaaggtactggaactgagagactctaacctcatcttcagcttcagttttctacgggggtcctctgggggacactgaggacagggaggccctgattagcctcacacaagcctgcctgagccccagtagtgggagctgggtccagccacacacacctcagtctttgctggccacgctcatgcccctcccaggtaagcctcactcaggtatctgttttggggtagggaatagtgcaatgcaatgccaccccccacagaaatgtggacagcagtctcaataaaggtatatgagggggtaatattcatactgttatgggggtgatggcagtaaaggctcagaggaaggcctactctctcgagtctagggtggggagagtccatcttgtccctcacccctcacctctatccccaagagctaagggagctggatgcaatggcagagtgcaaggcccagatgcacctactgccctcaccacctgaaccccggctctgcggactgagtgagggcccccaagcctggctgttgcgacgccagagtcgcgctctcttgagtgcgctgcagcggagttcacccgtgtgggttcctgagtctcgaagaggcgcccagcttgcggaaaggcgactgcggcaacgcctagtgcaagtcaaccggaggctggagtcactgcaggatctgctgacccacgtgattcgccaagacgagtccgacgccccgtggtcagtgctggggccaaatgcacggcggcctctggagggcgtcttagagaccgaggctctagaactgagccagttggtgggcacgctacaacgcgaccttgattgcctgttgcagcagctgaagggcgcacccccgtgcccctcccgccgctgtgctgcggtggcccacgctctctggactggccgcctacccttgccttggcgacctcatgcgccggccggtccgcagccgccctggcactggctgcgacagttgtcgcgccgtgggcaactgttggttcgttacttgggcgtgggcgcggacgcgagcagtgatgtaccagagcgcgtcttccacctgtcagcctttcgccacccgcgccgcctgctgctggcattgcgtggggaagctgccctggaccagaatgtgcccagctcgaatttccctggtagccgaggctcggtctccagtcagctccagtataaacgtctggagatgaacagcaaccctctgcacttcagggtatcttcgcgccgcccctcgttcgcggttccagtcccctcgaagtctctaattacacctcgcagttaccccttcttggtgatcttgcccccggtaaccctgctagcttctccgatctcgcttcaccacgacctcctacccgctaacccccacttcccacctgccacctcccagcttcctagccttgcctgaccagcttctgacgcccccaggtggagaatggtccaaatcccacggttccagagagagggctgctgctgatcgggctacaggtcctacatgcggagtgggacccaatagctggagccttgcaggacagtccttccagccaacccagccctctgcctcccgtcagcatcagcacacaggccccgggcaccagtgacctgccagccccagccgacctgactgtgtactcgtgtcctgtgtacatgggagggccccttggcaccgctaagctgcagagcaggaacatcgtgatgcatctgcctttacccaccaagctcacccccaacacctgtgtccaaaggagggtccatgtgtgcagcccacccctgtcttgagcccgtctaccaaaataaagttgtagtgattccatgaaagatttctgagatatgggggtagagtagggtgtgtgcacaccaagaaggcagaatgtgacacactaggagaaaggtacagtgtgcataactgagaaaagaggaggtatattcacaccgaaggtagaagagggcatgtgcctggcagccgggaaggggaaagtgtgggtacagttggggtggggtgggacttggtgttaatcatgtatccaagaagctaggcagacccagcagtggctgacacacagaatcctaaatccttgccccgctctctactgtggtctcagcacttgtgctaaatccacaagggatatgtttgaaaggagaacattagcactcaaaattctttcttaaggcatttagtggtgttcttggcagtgcctcaatcctgccctaccactcattcctctcctacgatggattctctcagtgagtcatgcatatgaaaaaagccaagtaagatacaaggtcctatgttcattcaacaattattcattgagcattccttggaaccaggtattcttctatgtgctaataaggttattctagtgtagggcaacaggcaataaaaggccaacatataaataattttgatgattttgaagtcctataaagaaaacaaaatagaccgatgcgtcaagagggtatgtgatgagacgggagcagttagtataatctgagtggtcaaggaagctttctgcatatttgaaagtagctatttaaagatctagaaggaatattcattcaggtagagccctcagtaggtacaaaagtcttgaggcaggaacaaccttgaagtgttcaagaaacagcgtatgcagccagagcatggcgagtgaggggcagagcgacccaaaatgatgggaacgtatagaaaggggtggctcacgtggccgtggtaatgatcttgtatttttcaaaagtataatgagaatgtattgtcaaatagtaggtgggagagtatatgatctaatttgcattttttcaaaggtcactctgcctgttctatggtggatggatgctagaaaagccagggtgacaaggtagaagatctatttggacccaactgaagtaattcaagtaagggataatggagtttgggcaagggtttaaatagagatgaagaactgacagatttaagaactattctggaggtaaaaccagcaggactgatggaatggatgtggagaataaaggaagaggaagaatctagggtgatttggattttaagcttgagaaactaggtgtatcatgtgtcattaactgagatgggaaatttgagggagcaagcagctggagctaaggaatcaagagttctgctgctttgatattttctgttattattagttgcatgactgcctgctaggccagggcgagcctgtccgacaaaagttgagttagagtatggcagaaccaaaggcctatatgagcttcactccttgcccccaagcatcaaaacttacgtagtattaataaactcagctcccttgctctatggctaggtaccagctacgtggtgggaggaaatgcaaacagaagtgtatacaggcatacttgaagctattgtgggtttggttccagaccaccacaataaggcgaatattgcaagtcacatgaactttttggtttcccactgcatatgggttacatttacactatattgtagtctattaagcatgaaatagcattatgttaagttaaaaaaaaaaacaaggtataccagcctggccaacatggtgaaaccctgtctctactaaaaatacaaaaattagcgaggtgtggtgacgggcacctgtaatccaagctactcaggagactgaggcagcagaagaatctcttgaacccaggaggtggaggttgcagcgagccgagattgtgccactgtactccagcctgggtgacagagcaagaccctgtctaaaaaaaaaaaaaaaaaaaaaattgcataccttagtttaaaaatactttattgctaaaaatgctaataatcatctgagccttcagcaaatagtaatctttttgctagtaatcttttttgccttaatattgatagctgctgatcagggtggtgactgctgaaggttgtggcaatttcttaaaataaaacaacagtgaatacgagtccatatcaatggactcatattttcatgaagaatttgtctgtggcatgtgatggtgttttacagcattttacctacagaacttatttcaaaattggagttaatcctctcaaaccctgctgttcctttattaactaagtttatgtaatattctaaatcatttgttgtcatttcaacaatgttcacagcatcagaaatatagattccatctcaagaaaccactttctttgctgatccataagagcaactgctcacccattaaagttttatcatgagattacagtaactcagtcatatcttcaggctccacttcttattctaattctcttgctgcttccaccacatctgcagttacttcctccaatgaagtcttgaactcctcaaaatcatccatgagagttgaatcaacttcttccaaactcctgttaatattgatattttgacctcctatcatgaatcaaaaatgttcttaatggcatctagaatggtgaatcctttccagaaggttttcaatttactttgcccagatccattggaggaatcactatctatagtggttcctatagcagcaatagtctcacaaaatgtatttctttttttaaattttcatttctttacaaaatgaatttcttaataacactataagactatagcagcaatagccttacaaatgtatttcttaataagatctgaaagtcaaaattactctctgatccatgagctgcacaatagatgttgtgatagccggcatgaaaacaacattcatctccttgtacatgtccatcagagctcttcggtgtattgccaatgagcagcaaaatctttaaaagaatctttttgttctgagcagtaggtcttaacagtaggcttaagatagtcagtaaaccatgctgtaaaccgatgtaccgtcatacaggctttgttgttccattaagacagcacagacatagcagatttagcataattcttaagggccctaggattttcggaatgttaaatgagcattggcttcaacttaaagtcaccagctacactggcccctaacaggtggtcagcctgtcctttgaagctttgatgccaggcattgtcttctcttctctagctacagtaagtcctagatgccatctccttccaacagaagggtgtttcatctacatggaaaatctgttgtttggtgtagccaccttcatcaattcactgcagcttccacattagcacttgctgtttcaccttgcagttttatgttatggaaatggctttccttaaacttcatgaaccaatctctgcaaacttcagacttttattctgcagcttccttgcctctctcagccttcatagaattgaagagaattagggccttgtcctggattaggctttggcttaagggaatgttgtggctggtttgatctgctatccagatcactaaaacttcctccatatcagcagtaaggctgtgttttgctttatcagtcacatgttcacaggaattgcacttttaatttccttcaagaactttttccttgcattcacaacttggctaactggcacaagaaacctagtttgtagcttaccgtggcttttgacctgcctccctcaccgagcttagtcatttttagcttttgatttaaagtgagagacatgcaactcttcctttcacttgaacacctagaagccactgttggattattaattggactaatttctatattgtttgtctcagggagcagggaggcccaacaagagggagagagatgggggaacaggcggtcagtgaagcagtcaaaacacacacgacatttatcgattaagtttgccatctcatgtgagtgcagcctgtggtgcccccaaatgattacaataccaacatcaaagatcactgatcacactgatataataataatgcaaaggtttgaaatactgtaagaattatcaaaatgtggcacagagacaaaaagtaagcacatgctattgggaaaatagtgctgatagactagctcaaaacggggttgccacaaatcttcaatttttataaaacacactatgatgtgcaataaagcacagcaaaaaataaaatgaggtgtgcctgtactgagcatcactcttcacaacctcttcaaaatggtaactcaccagtgagtgtggtgcaactgatgttctttaacaaaaggctgagcagagaggcaaaaactcccactttcctcagagcccttttctacagtcaactagggtgcatggctgtgccttcaggaaaggagataagtagagtattaaaagaagtccttttggaaaaatgaaccatctgtctatgtttaccattaccactatttgtcctccagtgggagcagggaacaatagtgagatatctgtaaaaccatctgaaattggttagaatattttctacatatccatgccattttctagactgaagtcattcttgaattatgcccagccaagttgttaaactttgtctagtagagattattaaatgagttccatatgacagcatagcccaaatacaatgactgctatgtaaaaatgttccagatttgataattgcactattaagttctactagagcaattaaaatcccattaggaagttaaaatcccaaacaatgaaaggaaggaagaagtaagaggcttgacaaaggggagaaatatgtctcttcccattctgatgaacgggggtaaatggagtagagacaagaaagggaagaatatgatgtaatcaacctgacctggggctgcgaagcctcagagaaggaagcagcagcgccaagggcaaagaggcttttgccttttccctactggaactgtggaaggaagctgttctgtagcacggatggactaactgtggtcccaacagcattaagagagcagagcagcatggtcaggaagaggtgtctcttaatccctatatggcgtagatactgactagagaggctttaggcccacaggagtatgcggcagagaatcactggggtttccagcaccaaagagagttgttgagagagggccaaactggggggagtggggaggaacagggggcacaagaccacaaattcatcagctttagaggcaaatgttggcagaatgcccaggtatgaaactgagccaactacccagaggattccaacttgtgcacaaccaaagccagtgttaggcttgaggatcccttcagtctaacatcaaaaggtcacataagccctcctctctatacccagatgccactttagagaggagcagcattagaatgggaggaatttaaaattctgagcatttatttcaaagagaataaatgaaacctaatgaaatgaaaccaaatttatttccagcctcttccactacccagtgaagaggaaggagtaagatttgtgaggaaaatcagatcagtaattgagaaaaaagctacattttatttatgtatccaactttgtaagaaaaattgtgatcctgctctgtatactacatagactaataatccaaaaacgaaaaaaatctgactagcactctgcagctcacctaaaaactcatttagttttgcagctttacagtctaatttgaaatttatattcagaacaggataaatgggggaaatgtctgaaatattaaaaaatgacagtttcatacactaatgcttatgaagccctagtatctgtaaaataggtactattattattccattttatagatgaggaaactgagacacacattcagtaaactgcccaaggtcacacggccagaaaatggtagaacctgttttggaacccaggcatttgtctccagaatccatgatctctacagcattctgttgcctctgtcataccaagatttagtgagatagcggaaaacaagaatcctcaagcattgttggcagatgcggaaactggtgtagttactctggggagcaatctgacagcacttagtaaaattaagtatactctgttctaccaattccactttcaggtttatgtctcagatggtcacacacaaaatgagctgagactttgagaggctgaggtgggaggatagcttgagcccaggagttcaagaccagcctggacaccatagacagaatctctctctgtaaaaaatttgaaaaattagctcggtgtggtagtgtacacctgtggtctcagctacacaggaggctgaggtgggataattgcttgagcccagggggtggaggctgcagtaaactgtgattacactacttcaccactgcactccaaacttggtgacaaggtaagactatgtccccaaaaaaaaaaaaaaaaaaaaaaaaggaaagagagagaaagagaaagtgaaggaaggaaggaaggaagggagggagggagggagggagggaggaagagatttgggaagtgttctctcctactgtactttctaagagtttatgtaggagtgatatttcttaaaaggttgatagaatttgacagtaaagccatctgggcctggagtttttttgttttgatgtgtgtgtgtgtgtgtgtgtgtgtgtgtgtgtgtgtgtgtgtgtgagagagagagagaggtttttaatgacaaattctatttctttagtagatacaaggctatcagattttccacttctttctgagtccattgtggtattttcaaaaattttatcttagatagaacgtaagtttttgaagttactggtataagttgttcataatagtcccttattatccttttaatgtctgtaggatctatagggatgtccctgctttcattcatattttcagtcttcgtatttttgatcagtctaaataaaagatttgtcaattctattgatcctttcagagaattagctttgtgtttcattgattttctctattggttctccagtttctattttatcactttcaacttttatctttttaaatttcctttcttttacttatttttgttttaattttctctttttctagcttcttaatgtggaaacttagattatttattttagggttttttcgagttttgtttttttttttaatacagagtcagagtctctctctgtcacctaagctggagtgcagtggcacgatctgggctcactgcaacctccacctcccgggttcaagcgattctcctgcctcaacctcccgagtagctggaattacaggtgcgtgccaccacgcccagctaatttttgtatttttagcagagatggggtttcaccatgttggctaggctggcctcaaactcctgacctcaggtgatccacccaccttggcctcccaaagtgctgggattacaggcatgagccaccgtgcctggccgattttaggtgtttcttatttcccatataagcattgaaagctatacatcactctctaacatttatttagctgcatctcacaacttttgctttgttgtattttcattatttctatttatttttctgtggccaggtggcacacagagagaatctgtgcacttgctggaaggagagcagagtgattgtgggactttgcattggaactcagtgctgcctatctgggtggaaaacagcaaaaacagaatccagccagtgcccacgaagggagaatttagaccagccccagccagaggggaaatgtccattccggtggctggaacctgagttctggcaagccccatgaccataggctaaagtgccctggtgtcctaaataaacttgaaaggcagtctaggccacagggactgcaatttctgggcaagtactggtgctgtgctgggcttggagccagtggacttggggtgtacatgacctagtgagacaccagctgaggcaaccaaaggactgcttgcattacctgtcccccaaccacaggcagtgcagtttgcagctctgggagagactctttccttccacttaaggagaggagaggggaaagtaaagagaactctgttttgcaacttgaacactagctcagccacagtagaacagagcacgagcaggagtcctgagacccccatttcaggtcctatcttctacaagatagacacaccctgggccagaagggaacccacgtccttcatgggaaggactcagtcctggaaggattcatcacctgctgactaaagagctcttgggccttgaataaacctcagtggttgtcaggcagtacttacccaggggcctgcagtgagacccagtgctgtgagggcttcaggggtgacccaacacattcctagctgtggtggccatggggagatactcctactgcttgaagaaaggagagggaagaataatggggactttgtcttgcgacttgggtacagcttggccaaggtgaggtagagtactaagtgggctccctggggttcctgattccaggccttggttcctgggtgcatttcttgacctgccctggaccagaggggagtctattgccctgcagggagacatccaggcttagcagcattcaccacaagctgactgaagagccattggaccttgaatgaacaacggtgttagccacgcaatacttgctgcaggcttgaagtagtggtggccatagggagagggtccttctgcttcaggaaaggaaaggaaagagtgggaaggacttgtcttacggcttgtgtgccagctcagccacagtagaataggccaccaagtatattactaaggttcctgacttcaggccccagctattggatggtatttctggactgaggggtagcttgctaccctgaagggaaggcaacaagcctggctagatgcaccacctgctgactgtagagaccttgggccttgagggaacatcagcggtaaccaggcagtagtcactacaggccttgggcaagacccagtgctgtgctggcttcaggtgtaacccagcataatcacagtgatggtggctataggggtgcttgtgtcacctcttctccagctccaagcagctcagcacagacagacagactttgtttgtttgggggaaattaagagaagagaacaagagtctctgcctcataatcaagggaatgctcatgaatcttacccaacaccatcaaagtgctacctctatgaatctacaagagccacagcaattactgggctgggggttctcactaatgcagatatggctgcagtgaccaaagacttagatcacaacactaaattctctttgaatatttggattgcattccaaagaaggatggttataaataaacccagactgcaaagagtacaaatacctaattcttcaatgcccagacactgatggacatccataagcatcaagaccatccaggaaaacatggcatcactgaacaaagtaaataaggcactagtgacaaatcctggagtaacagagatgtgtgaccttttggacagagaattcaaaacagcttgttttgagaaagctaaaaaaaaaaattcaagataacacaaagaaggaattcagaaccctatcagataaatttaacaaagagagtaaaataatttaaaaggatcaagcagaaatcctggagctgaaaaattctattgacatactgaagaatgcaatggagtctttcaacagcagaatggatcaagcagtagaaagaattagtgagcttgaagataggctatttgaaaatacacagaggaaacaaaagaaaaaaaatttaaaagccaggcacagtggttcacgcctgtaattccaggactttgggaggctgaagtgggtgaatcactgaggtcaggagttcaagaccagcctggcccacatggtgaaaccccgtctctactaaagatacaaaattagctgggcatggtggcatgcacctgtaatctcagctacttgggaggttgacacaggagaatcgcttgagcctgggaggcagtggttgcagtgaaccgagatcgtgccattgcactccagcctgggcaacaagagtgaaattccgtctcaaaaaaaaaaaaaaaaagaaaaaaaataccacccgggaaaatcaccttcacaaaaaggaagatggatggacagatggaagaaaggatcacaaaacaaccagaaaacaaataacaaaatgacaggagtaagtccttacttatcaataataacattgaatgtaaatgcactaaaatctccaatcaaaagatatagaatggctgaacagatgaaaaaacaagacccaataatctttttcctgtaagaaacacccttcacctataaagacacacatagactaaaaataaacaaatacaaaatgatattcaatgcaaattgaaaccaaaaaagagcaggagtagctatatttgcatcagacaaaacagatttcaagacaaagaaggtcattacataatgataaaggggtaaattcagcaagaggatataataattgtaaacatatatgcacccaacactggagcacccagatatataaagcaaatatctttagaactaaagagagagataggccccaatacaataacagctgaagacttaattaccccactttcagcattagacaggtcatccagacagaaaatcaacaaagaaatgtcagatttaatctgcactatagagtaaatggatcttacagatatttacagaacatttcatccaatggctgaaggatacatattatattcttcccctcaacacgtgttattttcaatgataaaccatatattaggccataaaacaagccttaaacatttcaaaaatatgtgaaaaatatcaagtatcttccttgaccacaatggaataaaatcaataataggaggaactttggaaactatatgaacacatggaaattaaataatatgcttaatggccagtggatcaacaaataagaaaaaaaatttaaaaatatttgaaacaaatgaaaatggaaatacgacagaccaaaatctacgggatataacaaaagcagtactgaggaaagtttatagcaataagcacctaatcaaaaaagtagaaaaacttcaaatgaacaacctaatgatgcatcttcaagaactagaaaagcaaaagcaaaccaaacggaaaattaaaagaagacataacaaatatcaagcagaaataagtgagattcaatttttaaaaatacaaaggatcaataaaatgaacaggttttttgaaaagataaagtcaacaaacctttagccagactaagaataaaagagagaagacccaaacaaaatcagatgaaaaaggagtcattacaactgataccacagaaattcaaaggatcatcagagactatgagcaactaaatgccaataaactggaaaagctggaagacataaattcctagacatatgcaacttactaagattaaaccatgaagaaatccaaaacctaaatagaccaataacaagtaatgagatcaaagccataataaaaaagtcttccagctaagaaaagcacaggacccaacagctgcactgactaattttatgatacatttaaagaactaatatgaaccctactcagactattcaaaaaaaaaaaatagaggagggagtactttgaaactcattctgtgagccagcgttaccctgatagcaaaaccagacaaagacacatcaaaaaaaggaaactatatcactgatgaacatttatgcaaaaatcctcaataaaatactaggaaacctaattcaacaccccattaaaaagatcattcatcatggccaagagggatttatcccaggaatgcaaggatggttcaacatatgcaaatcaatcaatgtgatgtatcatatcaacagaatgaagaccaaaaaccatatgatcattttaattgatgcttttaaaacatttgataacactcaacatccttttatgatttaaaaaagccctccaaaaactgggtatagaaggaacatacctcaacataataaaagccatatattacaggcccacagctaatatactgaatggggaaaaactgaaaacttttcctctaagatctggaactagacagggatgcccattttcactactgtcattcaacatagtaatagaagtcctacctagagtaatcagacaggagaaaaaaaaataaatggcatccaagttggaaaggaagaagccaaattatccatatttgcagattatattatcttttatttggaaaaacctaaaggctccaccaaaagctattagaactgataaacaaattcagtaaaattgcagaatgtaaaatcaacatacaaaaatcagtagcatttctatatgccaacaacaaacaatctgataaagaaatcaagaaagtaatcccatttacaatagcaacaaataaaataagatacctaggaataaacttaaccaaacaagtgagagacctctataatgaaaactataaaacattgatgcaagaaactgaagaggacacagacaaaaaattgatagatattccatgttcatggattggaagaactgatattgttaaaatgtccgtactatccaaagcaatctacagattcactgcaatccctatcgaaataccagtgacattcttcacagaaatcgaaaaaataatcttaaaattcatatagaagcacaaaagacccagaagagacaaagccatcctgagcaaaagaacaaaactgaaggaatcatattacctgtcttcagattatactacagagctataataaccaaaacagcatggtactgccaaaaaaacagacacatagaccaatggaacagcatacagaacccagaaataaatccatacatctacagtaaactcatttttgacaaaagtgccaagaacatacgttggggaaaggacggtctcttcaataaatggtgctgggaaaataggatatacatatgcaaaagaatcaaactaggctcctctctcttgccatatataaaaatcaaatcaaaatagattaaagacttagatctgagacctcaaactatgaaactaatgaaagaaaaccttggggaaaccctccaagacattgatcttggcaaagatttcttgagtaataccccaaaagcacaagcaatcaaagcaaaaatggacaaatgggatcacatcaagttaaaaagcttctgcacagtaaaagaaacaatcaacaaagtgaaaagacaaaccacggaatgggaaaaaatatttgcaaactatccatctgacaaaggattaataatcagaatacataaggagctcaaacaactaactctataagaaaaaaaattggccaggtgcagtggctcacacctgtaatcctagcactttgggaggctgaggcaggtggactgctcgaggtcaggagttcgagaccaacctggccaacatggtgaaaccccatctctactaaaaatacaaaaactagctgggcgtggtggcaggtgcctgtaatcctagctacttgggagtctgaggtaggagaatcgcttgaacctgagaggtgggggttgcagtgagccaagattgtgccactgcactccagcctgggtgacaagaggaagattctgtaccccccaaccccctccaaaaaaaagaaaaatctaggctaggcatggtggcttacacctgtaatcccagcactttgggaggctgaggcaggcagatcacctgaggtcaggagtttgagacctagcctggccaacatggtgaaacctcatctctactaaaaaaaatacaaaaattatccaggcatggtggtgcacacctgtaatcccagctactaggcaggctgaggcatgagaatcgcttgaacctaagaagtggaggctgcagtgggctgagatcgcgctactgcactcaggcctggatgatagagattccatctcaaaaagaaaatttttaaaagaagaaaaaatctaataatctgattttaaaaacaggcaaaaaatcttaatagacatttctcaaaagaagagatacaaatggcaaacaggtaaatgaaaaggtgttcagcatcattaatcatcagataaatgcaaatcaaaactacaatgagatatcatctcacctcagttaaaatggcttttatccaaaagacaggcagtaatgaatgctggtgacgatggggagaaaataaacttttgtacagtgttggggggaatgttaattaatacaagcattgtggagaacagtatggaggttccacaaaaaactgaataaagaactaccatatgatccagaaatctcactgctaggtatatactcctctccccaaaaaagacaaatcagtatatagaaaaggtatctacactcccctgtttattgcagcactatttacaatagccaagatacagaagcaacctaagtgtccatcaacagacgaatagataaagaaaatgtggcacatatacagattgaaatactatattcagctataggaaagaatgagatcctgtcacttgcaacaacatggatggaactggaggacagatattaagtgatataagccaggcacagaaagacaaactttgcacgtgatggcagcggcaggccgtctggagcggccgctgccatccctctggctgcacagggaggcacagccagggctgcatgctccatggagccggcggaagctcccctggtgctgttgcacagctgtggacccaggcatccctgtgctctcgggaccaggagcaggcgggagccccgccctcctgggcacagctgcagccactcaaaccaaggctatagatctgggcctcccgctacaaagagcaggcgggagccctggtctccatgcgtggcttctccctgctgtcggcacttctccgatctcacagcacagtcggggccgagcccaggcattgttatgtcatggcccggccgggtgtgcacatgctcagggcagggctgccacgccagcctcctgctgcctcggctccctctgggctttgggcaccaatgagcataggagggaagctgagggaggggctgagaggaggcagacaggttcctggcataagggggtaggtcttgggtgaggccccaccttcaggccagggagggcctgaaggctggggtctgggtttccagtaccactgacaggagtgggaactcgtggcacttttcccagccagccatggccgccatggaccaattggggggcacctctctgctgagagctgaacatttgttgggatgagtggcctagtggagaggagctaccctctctgctaggagctgaatacttgttgggataccctggctacagaaaggagctgccccctgcggggttcttctgagctgttctattgctcaataaacctcccctttgtcttgctcgctctccacttgtctgcatacctcattcttcctggtcgcaggacaaaaactcgggacccaccaaagggcgaggctaaaagagctgtaacacaaacagtgctgagacatgccccttgcccaccacattgggggcaaagagaaggaaagaagagctgcagcccttcaaagagcccagatctgggagctccccaagccagggctgtgaccccctctctgggaccctgcaattcctggtgtctccaagtttatgggcaccaatgtgttccctggtgccagccgtggaagctgcttgccatgcacctggtctggctgcagactcgcagagagctggcacctgtgctggcaactggagctgctcgccttgctgcagcagccagcatgcccaactgtgtgcagtagccagaccctgtgtttgctcacactctccttgccattccatgcctgacttgctcttggcaggcatgggacccaggccagtagagtgagccaagcacagcctgccaggctgagtgggtgaaatgagcccagcgggcccgagcaaaacttgggcaaagaagctaccggccacaaaggtttctggacagaaaaacaacaccccaaagaccccgtaacatatggtctcgctcatttgcgggagctaaaaattaaaacaattgaactcatggagataaagagtagaaaaatgggaaagatagtggtggtcagtgtgggaggtgggcagacaaatgaggataatgggtacaaaaatatattcatagttagaatgataagatctagtatttgatagcacaacagggtgattacagtcaacaaaaatttattgtacattttaaaataactaaaggagtatgattggaatgtttgtaatacaaagaaaaaaggataaatgcttggtgtgatggatactccatctaccctgatgtgattactatgcattgtatgtctgtaataaaatatctcatgtaccccataaatatattcacgtactacatactcataaaaattaaaaagaaagtagacattggaagaagtaaggaataacataaggaataggaaatgggtgcatccaggttatgaagcactgcattgggaaatagtttgtttcatttgttcttttgcttttattagacattctcagcaaccgaaagtgctatagatcaattggggttacttcattgaaaagttttcccatgacaatctcagacactgctgatgagaatttaaatctgttcaataagtctggaaggcaatttagcaacacatataaaaaaaacttttaaattgtacattgcccttgacctagtaaatccccctataagattattttccctaaagaattgatttttaaaaagtcgttaaacatgtatatatagaggatgttgattgcagagaacatgaacatttacaaaaatcagagaaaacaaatatccaataatacagtactagttagattataatatatccaaataaagggatatggagcagccattctaaaaacaacattcatatttgtagattatgacatgattattgttctagtcttttaaaatgctttaataaatgtgtacccattcagttcagttgattaattaaaagttatagaatctcctgtgtcaaaaacaaaggaataagttggacatatttgcgtggctttatttctgagttctctatcttattctattgatttaggtatctatctctttccttccaccaatactacacaatcttgattaccgtaactacagtaagtcttacaattgggtagattcagtcctccctttattcttatttttcaaaatcttagctatctgattcccttacctttccatataaattttagaataatcttttctttgtctccaaaaaatcttggctgggattatgataggaattgttagacttctttatctatgtgaggataactggtatctttactatgttgagttttacaatccatatacatggatttagatctttgttttctatgtagatctttgtttctctctgtttagatcttttctttcatcagtgttgtatagttttcagcatagaagttctatacatgttttgttagatttacagcaagtatttttttgagtgtaaatggaattttatttttatgtgtgcatttctagtatatagaaatagtgtattttgtattttatgttcattttgtattttgcaatcttgctgaactgacttatttttgtttgtttgtttgagactgagttttgctctcattgcccaggctggagtgcaatggtttgatctcggctcaccgcaacctccgcctcccaggttcaagcgattctcctgccttagcctcctgagtagctggaaccacaggtgcacgccaccacgcctggttaatttttgtatttttggtagagatggggtttcaccatgttggccaggatggtctcgatctcttgaccttgtgatctgcccacctcggcctcccaaagtgctgggattacaggcgtgagctgccgcacgcagctgacttattaattctaaaaattttctgtagattccttgggattttctatgtagacaaacatgtcatctgcaaatagggacagcttagttcttcttttctaatttatataccttttatttctttcttgccttattgcaccggctagaacttctagcactatattaaactcaataagagtgatgagtgtgaaaatccttgccttctctttaatcttaatggagaggcatctggtttttcaccattaagtgtaataatagctgtatgtatttttatagatggtctttatggagttaaaaaagttttcctctattcctagttttctgagagtttttatcataaatgggtattatattttgttaagtactttttcctgcacctattgatataattctgtaattttttcttctttagccttaaaatatgatggattacattgatttattttctattattgaaccatccctagaataaacaccacttcgttttaatgtataattcttttttacatattgttgcattcaattttgctaagaactttgtgtctatattaatcaaagatattggtctgtagttttctttgtttataacatctctttctggttttggtgtcagagtaatattagcttcataaaatgaattggtgggtgttctcctctattttctgaaaaagattttatagaattagcgttatttcttctttaaacatttggtaaaattccccagtgaaacaatcagggcctggagtttttttttcttgggaatttttaaattataaatttaatttcctgagttgttacagggcaacttcaattatttatttcatattgcatgagttgtggcactttgtgtttggaggagttgtttcatttcatctaaactgtcaaaaacatgtgcatagaggttttgcagtattcccttacttttttatgtttgtacagtctatagtgatatttaatttctggtattggtaatttgtgtcttttctcttatttttctttgtcagtcttgctagaggtttgtaattttattgatcttttcaaagaaccagccctttgtttcattggcttgctctattgtttttcggtttctaatttcatggatttctgttcttatctttattatttccttccttctgcttgctttggatttattttgctatttttttcctaggttattgaggtgagagctttgattattattattattatttgtagcgacaggttctcactatgttgcctaggctagtctcaaactcctggcctcaggcaatcctctcacattatattttagtgggattacactataaatctcattgcagtccacttaggggtaataatctaagttgtttcaggtaaaatatggtaaacttgcagcaatataactccaataaattcccccaccccaccccaccttctgagctattgccatgtatatataatcaatatataagtccaatacataagtgttatactttttctaaatagttctatgtattttaaataaataagaagagaaaatagagagattttacatttgtccacatatttgccatttctggtgctttttatttttttctgtggatctgagttaccatctggtaccatttttccttagcccaaagaacctaattttttgtaatgcaggtctgttagcaataaatttcttgtttttgttccttcctgccccattcaagatgtgtttatcttgttttcatgttgagtccaggcaacaaaactgcttgatatagaattattgtttgacatattttttcctttttaagcactttgaatatgtcattccagtatcatctgtcctccattgtttttgatgagacattgccttttaagtcatatccttgttctctgtacatgtgtctattattttccatgttttatctttggctctcagcaatttgattatgatatgagagactatgcataagaaaatttaaggacccaagtttggcaataacatacattagtttcactaccatccaactggttagactcaatcacatggccacccttaactataagggaagctggaaaatacaatccagctgatttcccaggaagaaaatgggtgttagaaacagctggcaagtctctgccacaacatacatacaccaaaaccaccatatatattgccaaagacacatatgtgtctagggacatacaacgaatgcactgtgggggaacacaagaggaactgaagtgcaaatcaggaatgaagggaacaaataaaagaacaggaggggggcctttcatggactgatcctaacatagtgtcatgaacttaggaggaggattaactcaattctcattaattgagaattctcattaatctatgtaccaagagcaagagaaaagcccaatagcagtggtgccagcagtgccatccttaccagactgattctaacatattaccttagtttttgcagtggttcatcctctgttgattcctatctgtttcatgcctcacctccagacttcacagttctgtgaattacttattgctatccttccaataatttttctttcttttttttttttgagactgagtcttgctccatcgcccaggctggagtacagtgctgcgatctcggctcactgcaatgtccacctcctggggtcaagcaattctcttaccttagcctcctgattacaggtgtgcgccatcagagctcagctaatttttgtatttttagtagagatggggtttcaccgtgttggtcagctggtcttgaactcctgaccttgtgatccgcccaccttggcctcccacagtgctgggattacaggcaggcatgagccaccatgcccggccaatttttcttcttaaccacagtttattgtagtcaaacttatactattacagagtagatttattttacctgttgaatgtccagtccgaggttgaactttatccattacagtaggcatccttattttgttcttggcttcaatgggaatgctgcaggttttcaaagctggaaagctgttgcagaaagcccaatatgtacataaacttgctttccagcagcaacaaccaaaacagcagaaagacagcctttacctcccaaatctcaaatgaagaaatctaattggtggaactgatcttgtactcagaaccctagcttcaagggttttaatttctccaggtagcaaagaatttgaggcaaccaggtgaatggataaatttactatggtggatgcatactatggaatactcctgcagctgatggaagcaacaaactagattaacagctacatggaatacactggttatttacctattttttttcagctgctagcctttccatctctccccctgcaactcccccaattctctcctctacccacccccacccccacattctggctgtgttgctgtagctggggttctacaaacatttcccagaccccattgccaaatttcctgttagggtctgccaatgggataccctaaaggaacccttaaagataggagagacttcattcctgttttccagttgtcacatgatctcagctgcagacatctggcttctactagctagttctgcactcaacatcagctttgccacacttctcagagatatttgcagcagtctgactacccacttggcagtctgagatcagtcatcccttgctttcccaccctcagggccatgcctttcctcagaggtataagcaccaagatacctggagggagcttctcccataaaagtcagtatcagtcaaagaaggccccttctctgagctcctagtttctggtaatcacatcacctcttcccttttgttttcacaggccttggaatattctgatttctgcagttactaattttttagttacaacagcaacttctttctactctttcagtcttctaatacttgtaattaagtctctgtattaaaagtcctcttcttgaaata

SEQ ID NO: 15553 - DNA, 99005 bp, Homo sapiens
agaaagtcacagggtacagcaactcatacttgctcccagcaccaggccagccccattctgcctccagggagtcacccaaaatagagagatgagggtaaaataagacctaggaatactatttatttgcctccatggcctttgaacttgcacatccaacgtaacggctcctgtgtgttcttgattgttccaattatcatttttcctctcgaatacctgagagcattcattattttgcaagagatttgagaatccctgtgccctaacttttctttccttgatgtgggatgttcttctgtgactaggtaagtttatctcaatgtgtccccaaataatttctcagaatgttaaattcataaaagctaccatgaaaggataaataaatgaaaggagttctgaggtcaaaacatttggggaaagaagagtctttctccttctgaggcattctcagtgcacagtaacctgtttatctcgctttgccttgctctttcccaagcacatttttgctcaacgccccctaccttccccatacacttgttaacactttgcagagcactagggctctgtgggacaggctgggaaatgcaggttgacatgccactgttaatacctagaaaattaaggcaaacttgtccctgagagatgtcaggatagcacagtatggaaaggccatgcttatcagggctcttatctgagagaatacagtggttatgagcatgactctggaactagacagtctgggttgaattccccgctctgccatttagttatatgatatggggtgtattacctaacatctctgtatctcatttgttcctcacttgtgacatggggatgatgacaatgataatagtaccaacctataggatagctatgagaattaaacaaattagtaaatatgaagtatttggaacattggcctgactcaggataagtcctgtttaaatgttagtatcattattattgtttcttcaagccaggaatatacttcatcaattatgtgtacactcattccttcattcaacaaacacttacttaatactcctgtgtcctaggcactgttctagtgctggagatacatcagtgaatcaaaaacatgagagaaaaatccctgtccttgtggaacttacactgtagtggaatctactactaataatgcaaatagaaagaaaaatatatgcaagttacccaggcactgggtagcctagtacctgtcctatagttgtcaaatggatggatatattattcttattgttgttgtcgtttacagtaattgagcttggaggtttgagctgccatcttagataagaacagaaagctaagccaatacgagtgccatgccagtaagaaaaggaaactattacataaagattaggaagaaaaaagagaagaatgacaagtaggccattatctatggccatgagttttatttaaaatgagctggaccttttttgccttctttatctgtgtatcagatagacaattacctctaggcagatttccacattccaagacatgaagactttctaagctgcagcagacacatctttacttgtagcaaaacagagagcgatgggggttattttcagatgactgtagctgaagaggaagaatcaagtaattcactccccccaataataattcacttctgagaggaaaaacttctttggaaaaagcaccccatgaatggaagtctcagcatttgctgaagaacttagttaaaataaactctagacctttttcattgattctttatctcttcttttccagaaaccttctctatgtctacccacagaggctgaactttgtaaacaaactagcatcagcccggaacattacaataaagatccagtttatgtgtggagaagatgctagcaatgcgatgccggtaaggagggaaacgaacatttgcctcaaatcagggtgggctgctcacccctgtcacttcacacaagtccgggactcatcagtgtacaaagtccgtctattccaggccaatactgctcagcatgtgcaagggcttctgtgcccaggatatcagtggggaaacagggtcagtcttacttgacgatctctttctcggcttattctgtagtgagcttggaacatacagatcattttagaggattaaaaaaagtcataaagtctttccatactgcccataggaccaccccactctaaaggcatacaaagtaaagagatggctcaacacgtgcgccatgtttgctgagtgtcttccatgcacaaactgtacacactgtgttatacacacacagtgttacacacttactcaagcctcggaccacagtgctgatgaatacaaagtaccgcctagtaattataaacacacaccacctccacaccttctaggagtggatctttgttctgaggcaaaatataaatcaaattattcatatatatatatatatataaaatgcagtgtgctccaaggaactcaaaatgccagaatttatactttttaaaccatctcctactaaatgagatggtggttagctattactatttcccataagtcatagaattcagttaatataactttctttctttttttcttttttttttttttttttgagacagagtttcactctttttgcccaggctggagtacaatggccgcaacctccacctcccaagttcaagtgattctcctgcctcagccttccaagtagctgggattacaggcgcgtgccaccacgcccagctaattttgtatttttagtagagatggggtttcaccatgttggccagggtggtctcaaactcctgacctcagctgatccacccgccttggcctcctaaagtgctgggactaaaggcgtgagccactgcacgcagttaatatacctttctaaaaagaaaaagaaaaaaatcctttctcttaatgtcccacccaaagaaaaaaagaaaaaaaaaaacctttctcctaacgtcccacctgtcttcccaatgcaaggtgtcttaagacagcggtggggtcctcttagtcctctctgctcaggcccctggcatgccactgccaggagtgccagatatgcttgtgcagatcctgtggcaaccaagatgcccagccaagagtgactgtgggctaaagtccagtctgttcttcattcactgagccatgggttctggtgttgggattactgcatctagaggaaagagctttttttctctgcacaaaggtgagtgcacttgttcataatgcatcctaaatgctgcttcaggcccaaggaggtatctttttctaaatggcacaaatgtggataaggcagtggagattcaaatcacctaagtgagtaggtctgtatgtttgagagagaagaacctggaactggggatttctcactcaagacaaaagtatgtaactttggcctgttggatagacctctaggcagtgaggcagagtggagagagtactggttttctaatctcacaaacatgtggcctttggtcactaatatagccccttggaacctcatttcacccttcatagccagttcctttgcactggtgtgcttgggccagttgtagtcccagcacttttttttttctttttgagacaggatctcactcttgcccaggctggggtgcaatggtgcaatctcgactcactgcaacctctgcttcctaggctcaagcgatcctcttgcctccgccccctgagtagcagggactatacgcatgtgccaccacgcctggctaatttttgtatttttttgtagagatgaggtttcgccatgttgcccaggctggtctccaactcctgggctcaagccattctcccacgccgacctcccagagtgctgagattacaggtgtgagccactgctcctggccaacccagcactcttaattgtacaaaatgcagctctatgagaccagaacatcctgttggcctgatgatagtcaatttgatgtacccaaatgttactgataatttgatcctttctctactggtgaacaggtcatctttggaaaatccagcgggcctgaatttctgcaggaagtgtacacagctgttacataccataataagtaagtctatttcagcattctaaatatatgccaagatggtttcatcatctcctggtttttccaagtcccgtgggtggttcctcctaactatttttataattcagggactgaggggcaaaggaaatccatgccagttccgtgactctgtgttgaagatgtataactttgccattaaccaagactgagagaagaacgtgtcttcaagaatccaatatagttttgacttttccagaagcttctattctagtatgatgcaaagaggttgtattacgttaattaaggaaacacatttcctaacttgctttgagaccctggaggggaccagaagcacagtccggctccccttgccctgtgtgtccctgtccgctccacttgacacctgccccactgtctgcctaggctgaccaaaggagaaatggaacactcattattccaccggcaaatggagtcatgggataatgcccaccctattattcatgttccacagggaagggagagacacctgcacagtgttggacggaattgggtttgatccgggcctgataacctgggcctaattaagtccttcatttaagcacattctgggattgggatgaggattaagtgaggtaatgtacattacatacctacattactttacaatgtacgtaatgtacttcgtaattaatgaagaacctagggcttcataatgcagttaaattggttcctttttcctcctgcctcattcatttgcttctactctttgatgagtgcagctaggtgctaggcttggttccttgggtagaaatggaaaaaggaggtcacagcaggagtccaaacctcatcctttcttcaaattaagttgttggagttttccattgtgtgggggagttgttttttgttttttgttttttgttttttgtttttcctgacaaagcctttagttcatgaacagttttatgtaagggaagtgcatctaataacataagcttggtctcagggacttccagcttcagagcagagtaatgtaaaatgaaaagcaaaacaccaggcaaattctgaggagcaaaggggctgtggcgttttacaatcagagaagtcatcattcttgctaaaagttatttgtgtataatgtgcttttgaaacaggtctcctgacttttatgaagaagtgaaaattaagctccccgctaagctcacagtaaatcaccacctcctgttcaccttctaccatatcagctgtcagcagaagcaaggagcctccgtggaaactctcctgggatattcagtgagttgtttccagcctgctgactcacactgcagttgttggtgcatctgaggtccctgcagagataaacaaccaaattctattcacttgattttttccagtcagaagtagcaaaacatgctaagccacattatagcaagaggcagaaatgatttgccttagcaaatgtcaaatttcaggaatggaaagctagcgggtgatagatgttggaagaatactcatctgttttttaaaaagcattgcagtgttcactatttccaaatttaatatccatgcttcacgtatagaactagctttgtcccccaagaagaaaccattttttctttaaaagatataaaaggtgaaataaacattgatgttgttcagacacacacaaacattggctacagagaaaaatgctactgctttagctccaaaagcaataaatcatcaatattaccatttcaggaggtctcggagatttaaaatgcaaagaactggacagaaattactgccaaaaagagtactggtcaatatctactcactgtttagttgcatttgattattgcgagctagataaattatcagaattatatgctgtaataaataccactttattatttacatcatctgtttcagtggctgccaattctcttaaatgaacgtcttcaaactggatcctactgtctcccagttgccttggaaaaattgccacccaactactccatgcattctgctgaggtaattggcaagctggccatcagctgtttcttgtccagctgtagtcttggaccaccttcccagactcactttccattcccatgtggccatggatgttcatcatgttctcagagagcacattgttctgataggatgggaggaataactgactgtgaaacctcattcttttaaatgccaccaaatcagaatgttcagtagacgcaacctacacccaaggcagcataaccttgcattatctaccacagagggattcccagaataatgtattatagaagaggaggcaaactaaggccattcatagtaaacaactgttcccatcaaggatccttataaaagattcccaggccagattcatccgtttctttcttgggtcagttgtcacagccctccggtagataccaaggtatttattctcctaccaatcccaatgccaatagcctttcccacttcctgtttctggcactttctcttgctcatccactctgctgcagtgcacccatttaaagagaagcccaggtggatcaactgaggtcaggatttcaagaccagcctggccaaggtggcaaaaccccatctctactaaaaatacaaaaattagctgggcctgctgttgggtgcctgtaatcccagcactttgggaggccgaggcaggcagatcacttgaggtgagaagttcaagaccagcctggccaacatggtgaaactccatctctactaaaaatacaaaaaaattagccgggcgtggtggcgggtgcctgtaatcccagctactcgggaggctgaggcaggagaatcgctttaacctgggaagtggaggttgcagtgagctgagatcacaccactgcactgcagcctgggtgacagagtgagactccatctcaaaataaataaataaaaaataaataaagggagcccaggggactgtccaccctgactgcaccagctgtcacactgctagcccacttctcagttccttgcataggtttacatcaataagtattattttgaagtaaatctcggacatcatatttcattttagtctgcatcttaaaagataagggatttgtttttaaccatcacaataccattgtcatactttaaaattttaactgtaatttcttagtatcatcaaatattcagtcactgatcaaatttttaattatcccactaatgctatatttttgacgcttgctttttaaaattggtattcagataaggtccacacactgatattgattgttacatctctggagacgcttttaatctacagatcctccatctcttttgctttccttgcaattttaagttgaagaatttctcagaaatttgaatttaatttcaaccgttccagtcaactttcttctctgttctttcgccatctaccgtctcacttccggctgttttcctcttattttcttttttccttaaagagagaaccaacttttgccctggaccacaggcatgtgtctggtaaaccaaaacttctctcatcaaagccatctaaggggcaatccgagtatgtccacagacatttccctgattggtctttatgatttggacatcaacacctttcagtatccctcaaaaccaccttcttatcatcaagttgcacactctaatttcttagaaccccctattatctttttaagctataggaaagacctgagtgttggagagagacaaatctgtgtccaaagtctagattctgccactccctagctgtgtgaatgttggtgagttgcttaccctctctgagtctcgaagatgaaactgagcccatatctgcatatctgcctataaggttgctgtaagcattaaatgagataatgcttgccaaacaacaaactcaattcctaagtaaacattaattcctttttcttacttgcgctatgctgtgtttatagatatacccttagcctctcttagtatcctttaaacctgcactgtctgataagatagccactagctgtatgtggctattgaggaaaatatggctagttcaaactgagatatgtgctataagtaaaatatgcaacagatttcaaaaacttcatggggaaaaatgtgaaatattgtattaataattttttacattgattacatattgaaacagtctttaggctgtattgagttaaatgaaatattactttcacatggtccttttgtgtttttttttttttttttttttttttagagacagggtcttgctctgtcactcaggctggagtgcagtggcgtgatcacagctcactgtaatcttgaactcataggctcaagcagtcgtctcacctcggcctccttagtagctgggactataggcatgcaccaccacgcccagctaattttttttttttttttcattagaaacagtgtcttgctatgctgctcaggctggtctcaaactcctggcctcatgtgatcctcccactttggactcccaaagtcctgggattataggtgtgagccaccatgcccggcccctttttacttttttaatgtggccactagatgattttaaattacatatatagctcacgttatatttccactggacagtgctattttagatcacagatggcaaactcaagtgcccacaggatccagatgagtaacataaatgaatgccttgttctggtggcatctgttcactctggagattgtctcttccccatctgaaggtcacagctgttctcttcactctgcagattggtgacatgctgggatataaggccaattttttcatttcttccagtactcaaatgaagttagaaaagcagtcttttataggaaattttcaggctttcaaatattggtaattaattttttaaagttcctaatacttcaaacagaacgtgtgtgtaggctagagcccactttgggccccagcttttgactgcttcagatagctttaaaggtctccatcccctgtacacatctacctttcattatgatgaaagacatacaaacctaggcgaggccctcactcaacactgcaggacatctctaaaggaatgcaatttcaatgggaatttaaggcaagaaactgtctgtaagacctacgaaggtaatgatatataaacgtataaaagagtcactttgagtaattaaagcaggagccgacctggcctagaaacatgtgggaaacacttggaaaaactgtggtgaaagggaaagtaatatcgggtactcaaaagtattaaaatttcatgtcttgtaaagatattctatactttgtcctgacaattctgattaatggggaaattgctgggatcttaatttattttaattcctagaatccagaatcatcaatgctggtttggaacttagagacagattacaccgttcagccctcttctcacagcatgagaacagaacactaaggcccagaaagtttagttgagtcgtctaagtaaaaataactagtttgaagcggggcacagtggctcacacctgtaatcccaacattttgggaggctgaagtgggcagatcacttgagcccagaagtttgagaccagcttgggcaacatggtgaaaccacatttctacaaaaaatagaaaaattagttgggtgtggtggtgtgtgcctgtagtccccgctactccagagactgagacgggaggatcatttgagcccaggaggtcgaggctgcagtgaaccgtgattgcaccactgcacttcagcctggcgacagagtgggaccctgtctcaaaaggaatgaataaatacataaatattaactagtttggtgtagaattgaagttgaatccagggctcctgactccaagaacagttagattagttttcaagagagttctgtatttgtataaccctgacatttccagtcaagttggtctgcattgcttgttagtaatcagaaaagggaattggattgctaatcttttttttttctctttaacacagaaagtcccattacagaatcctcccattaagtgggctgaaggacataagggagtatttaatattgaagtgcaagctgtttcttctgtacacacccaggtaaggaatgtcaaggttaatcatgaaggtaaaggtgcagcggaggagcctttgaaggacaggccaataaaagatcagtgaaaatccttgtctacagataaataaaaaataaccctttagttctttgtggggacatgcaaacctctttaggtttcatttgtcattggaatagaaagaccttacaaaaccgccgagcacctaaaggaaagaacctagtatctgcactgttggtggagaaactttgcagggggacttgatttgaaactctcatctgctgttacttcttttccctctgtaactctgccactttgccagcttttaaaaagaaattccgtactctctcctttacctgccactgtctgagttctgcatctgctgagacctctctcttggcagtatgcttacctggtacgctgacctctgcttacagaacatgtcagagccaaaattatttcttctttagctaataattattgaaacgttcaacttcatgcaccacattctacaaagaagttcatagcctcggtctgaaacatcatgtcttagaccttctggtctgaaacgctggataagaggttctacccataaagagctattcgattgtgtttgtgaatccactggtgaacattgatggtataaaaccccatgaggcctgccttctcccttcgcaggacaaccacctggagaagttcttcaccctctgccactccctggagagccaggtgaccttccccatccgcgtgctggatcagaaaatcagcgagatggcgctggagcatgagctgaagctcagcatcatctgcctgaactcctcccgcctggagccgctcgtgctcttcctgcacctggtgctggacaagctcttccagctgtccgtgcagcccatggtcatcgctggccagacaggtatgaacctgcagggctgggctgggaggaggcaggagcaagcaagcattgccttctttaatgaaaaatgactttccagaaatccagagacaatgtgatcttcctttccactgatgatgtgtgctcaagggaggccaagtcttatgctattttttttttgagactctctgcatgttggaaagaaaaagaaacattaaaatagggttcttaatattatagctttttgtaaactttattaaatgattataggcagtctttaaaattccatttctggtaattgatgaatttattttaccttgaagatatttttgttttcttgactaacaggaaatggaacattttaaggtaagacaacctgtgttaaatggagggaaggaactctctacattgaaatgcaatgcaatcaatttttaaagttaaaacataaactcactattttaaagtgtatagttcattggtttttagtatagtcacaaggttgtgcaatgatcgctacaatctagttttataacattttcatcacctccaaataaaaccccatcactccctattcatccctccccctagaactcatccgttctctcttacagtctattttaaatgcttacttttaacaagttaacactaaatacaatgtgtacattttcccttagaaataatctcaaaagcttatcctggaggcatgaccagagtccagtggttctcctaactcttccagggtagactggctggtatagggcatctttatttgccaccattttcagctgtgcctatatagctctttgctttccagtccagcagacgtcttttgggtaccatccatatgcccagtactgtactaaaagttgtaggctttgtgacaataaccaagagcatctcagacctcagaggacttataatatggcaaagagtcagcagcacaggacaagactcctcaaagggacacagctaaattttgcagtggttgtggggagggtggtatcaaaggagagagtgagaaaacatccatctgggaggatgcaggaggtccacataaagagatggccttgaagaagggatagagtgaaaaccgacagaataggggcaatgagatgagtgcagcactgcagagaaccagaaaagtgtgggagtgtcaggaagaaagtcagtagcacagttggtggtggaacagaagcacgtgtggaagtgggctgggacaatgaagtgagacggcttttagagccagggaggggcatgtccccttaatctctcactctgctttgcaccctgatatgcatcttctgtggttccacagatcaaacgtcctgtgttggaggctaacttttcatccatgtagcagttgcctctccagctagattcttgcagagctctgccctccttcgattactttctgtgcccccgcatatgtggcacactgctttgtatgttccagctagttaatacagacttgttcaccagacaaaaatatttatatgttttgagcagcttctccatagcaagttgccaccttgtggtgtgaggaccacagggtgttggcataggcagaataagtggaggtggctagtctacaagcatttattcagaacctattctgtgtctctgcaatggaaagcacagtgggggcacaaaagatgtgagaaatgcacttcgcatgggaaggattccagctttcacagacagacagtttaccaccagacatggctggagaatcatgtaactcagtttcacttgagccctgtactgtgtggagtcagacggcttcatggaggaggtgggacttgtgctgagattcacagggtcggtatgattttgtggatgggagtgaggagggcttcctaggcgaggacaacagcatgagcaaagtctcagaggtaagagagcaggcatgatgggacaatacaatgactgcctcattttaagggatgtcgaactgagccaaaaagggtacaaggttagataagtatattggagccaaactatagaggcttagggcaccagaacaagaggttctatgcagtaaatcaaatgtgtatgggcccactgtgggaatgacttgatatgcagacatttttaggttaatctgtacaagaatcagggttgtgcagcacatctcaaatcatagtgtccacaacagtcacgtgagcatcttgtaaagatgcagaacctgattaatacactctctggggtggggcctgagattctgcatttcttagtagcaagcaggtgatagtggtcgtgtgtgtccgcagcccccactgagtagcatcagtttacaacctggcttagagaaggaggacgtctggacagtcttatgtctttgtcattaaaaaccatcaatgctattcagtggcaggaggaggaagttcaaaagagggaatgtggaggcatctgtggtactcagagccagcatgccagagctcaccaaaaccatctacccttcccaggcctagttaaattggtcagcggtcaggactcattgtcactgtcctggagaaacttccacctcaggctccttaaggaccagctgtgggactacccatttttctcttggttcctcagccaacttctcccagtttgccttcgagtccgtggtggccatcgccaacagtctgcacaacagcaaggacctgagcaaggaccagcatgggaggaactgcctgctggcttcctacgtgcactacgtcttccgcctgccagaggtgcaaagggatgtgcccaagtcaggtagagttgccctgagtgtgggactctggtgggcggggcaacaccacctccaccccactgcagtgtaatccaaaataaaacatcctatgctgggtgcaggggctcacatctgcaaccccagcactctaggaggctgagatggcaggatcgcttggagcagtggctcacatctgcaaccccagcactctaggaggctgagatggcaggatcgcttggagcagtggctcacatctgcaaccccagcactctaggaggctgagatggcaggatcgcttggagcagtggctcacatctgcaaccccagcactctaggaggctgagatggcaggatcgcttggagcagtggctcacatctgcaaccccagcactctaggaggctgagatggcaggatcgcttggagcagtggctcacatctgcaaccccagcactctaggaggctgagatggcaggatcgcttggagcagtggctcacatctgcaaccccagcactctaggaggctgagatggcaggatcgcttggagcagtggctcacatctgcaaccccagcactctaggaggctgagatggcaggatcacttggagcagtggctcacatctgcaaccccagcactctaggaggctgagatggcaggatcgcttggagcagtggctcacatctgcaaccccagcactctaggaggctgagatggcaggatcgcttggagcagtggctcacatctgcaaccccagcactctaggaggctgagatggcaggatcgcttggagcagtggctcacatctgcaaccccagcactctaggaggctgagatggcaggatcgcttggagcagtggctcacatctgcaaccccagcactctaggaggctgagatggcaggatcgcttggagcagtggctcacatctgcaaccccagcactctaggaggctgagatggcaggatcgcttggagccagaagttggagaccagcccagggaacataatgagactctgtctctacaaaaaatataaaaattagcagagcatggtggcacatacctttagtcccagctactcaggaagaagctgaggcaggaggatcatttaagcccaggagttggaggctgcagtgagctatgattgcaccactgcactccagcctgggaaacagagcgagatcccatctcttaaaacaaacaaacaaacaaacaaacaccctaaaattccattttcgttttcaggacaatacaaaacttacatgaatgctgaaattatgtgtttctttatagatctttcttcctccctccttgcctctttttatgctctaaacacttattttgtctgcccatttgataatccctcactggtctttacccacttgctaatttatgattcagctgagaatctcttttttaagatggagaagtggtgactgatgcctacgattctagtataataaaggaaataatatatatccaatggcagtggttcttaaactttttgttattaaaaaaaatcccttttcacatttccctcaaactgaactattgaaataatagtaatgcatttccccaactcttcttaattatttacataagtaataatcaagtagaacttcttgtcagcatgatataaaaattagtgtcagtgagttcacaaaattgcaggcccaaataaacatgacacttttgttggtctgtgcagcctcatttctagtaaatctgaaaatttgattgagtttttaaaaatactagtgatgtggctgggtgcggtggttcatgcctgtaatcaatcctagcactttgggaggccaaggtgagcagatcacttgagctcaggagttcaagaccagcctaggcaacgtgacaaaagcccatttctataaaaattacaaaaattagccagtcgtggtggcgggtgcctgtagtcccagctactcgggaagctgaggcaagaggattgcttgaacctgggaggcggaggttgcagtgagctgagatcatgccactgcactccagcctggaggacaaagtgagaccctgtcttaaaaaaaaaaaaaattaaatagtaatatctcatagatttccataaccgcttgtgaaaacatgtcaacatttaaagatgaaaaacagtgctgtatacatcatataccgtaatcctcacaaggttcagatgactctatggatttttgaatctgagaaaacctcactgcatgaattgtaaagttgtcatttaaatattgacaaattaaaaatatccacatttttagcttctcatgagaaatcagaagctctagcaaccctggggtccatttcccgatggcagtaatagactggagccagtagtaccccctgcctttgtaagaggcatgtgttggctgtttaccatgatctccaccactccctggtgccttatgccccatctacttctctccaaaagattgcctcctaccccaaccaggatttgttaagaagtctctaattccaaggcctaatccggtggcttttcatccaccctatccctcttcaattccttcttaaactcagtaagtaactctgttcccctgtctgttgacatgtctctgcctggtggggtgcaggcgctcccactgccctcctagaccctcggagctaccacacgtatggccgcacatcagctgctgctgtgagttcaaagctgctgcaggcccgggtgatgagcagcagtaacccagacctcgcggggacacactccgcagcagacgaggaagtgaagaacatcatgtcttcaaaggtaggaaagatgtcaaaccgtggaaggggacacaggcttttttattttttaactaaaacttggagaagtaacacagaagcaaccactactgctgcccaccatgctggtcggatgctttaatgctcagctttggagtgattaacgttctttagaacagattaagaccattctgacagatgcagcagcaagaccagcatctgaggatttgctgagaactacttagcttgggtagcaaagttttaaagcatcaggggtttagccacatggagtcatgtggctaaaccatgcattttattttcaaggaaaaaaaatagctttaacttttgatacctggaaaggttgcctttaatttagttttgtttctttaatacctacctcttacgttcattaacatccacagattgattatctcacaaaaaagtccaaaggaacagccgggcatggtggctcatgcctgtaatcctagcactttgggaggccgaggcgggcggattacttgaggccaagagttcaagaccagcctggccaacatggtgaaaccctgtctctactaaaaataaaaacattggccaagcacggtggctcacacctgtaatctcagcactttgggaggccgaggtgggtggatcacaaggtcaggagttcgagaccagcctggctgacatggtgaaaccccgtctctactaaaaatacaaaattagccaggcgtggtggcacatgcctgtaatcccagctattcaggaagctgaggcaggagaatcgcttcaacccaggaggcagaggttgcagtgagccaagattgtgccatttcactctagcctgggcaacaagagcaaaactctgtctcaaaaaaagatacaaaacattagttgggcatggtggcgggtccctgtaattctagctactcaggaggctgaggcaggagaatcacgtgaacacgggaggtggaggttgcagtgagccgagattgcaccactgcactccagcttgagctacaagagtgagactccgtctcaaaaaaaaaaaaaaaaaaaaaaaaatcccaaggagcaatgccaaattttacaagcatataaaaactgacatcctgagagggttgatggcttgccctatgttgtttttccctctatgaattctttatttttttcatggtaaagctttactttcagaacagttttagagttacggaattatatactctatacccagtctctcctttattaacattttacattcaaatggtacttttggcacaattagtgaaccaatattcatggaatattattcattaagttcatctttattcacaccttctcagtttttctctaatgtcctttttctgtcccaggatcccattctgaatgccatattacattttgcagtcttgcctccataggctcctcttgctggaaacaatttcttagactttctttgttcttcatgaccttgacagttttgaggagtaatggtcaagtattttgtagattgtctctcattaggaattttttaaagattatgatattattcacataccataaaattcacccttttttaaaagatggagtatacgatccaacagtctttaatctactcacaaagctaccacgatgaattcttagcctgaattttttctccaatgatctgtggcctcagggtggccgagctattagagtaatatcatttcccctgataaagagaaatcaaaatctctaggtttagacacagacacagtttcacccttacaaattccagccacttgacactgtgtggtgtgaggaaggaaatctgcaggccagggtttggggctgggcgccaatactgccccgctgtgtggccatgggaaagtcatgtaactgtgctgggcctcatgtcctcatctctgcagaggtcctggtccctgaatgaacttaagaaccatctaccctgggtcttttaaaaacactggatttggccgggcaccgtggctcatgccagtaatcccagcactttcggaggctgaggcgggcagatcacgaggtcaggagatcgagaccatcctggctaacacggtgaaaccccgtctctactaaaaatacaaaaaattagccgggcgtggtggcgggcgcctgtaatcccagctactcaggaggctgaggcaggagaatggcgtgaacccgggaggcggagcttgcagtaagccaagatcgtgccaccgcactccagcctgggcagcagagcgagactacgtctaaaaaaataaaaataaataaaaaataaatgaaaaaaccactggattcaccccctgagatgctgatgatctgtagtttgagccatcaggaattattcgtattctatcctttttgacttacaaaaatcagttcagggatgtgctggagtgagctcatacctgttcccaaaagctgattgcttagttttccagaattttttgagccagttttgaaacagacattgttaaaattaaatcgtataaacttaaaattaaataagttatattaaaaacaaaggtaatctgaatgcaatgtggtatgctagattgtatcctggaacagaaataggacatgagtgcaaaaactggtgaaatccgagtcgttcgtgtttagttaatagtaacatatcaatgttagtttcttagttttgacaaatgtaccttactataaaagatattaagagaaatgcaatgaaagtcatataagaaatactacctttgtaacttctctgtaaatctaataataactatacaacttatacttcaaaattaaaagttcactttaaaaaggtaaacctagtcccttcctaataatttcactatatgctacaatatctaagttcttccttctttacgtttactgtgtctgtgtgatggaaatattatataatggtttgctaccacactgcatttctatgacatcgtgttggtagattgaaatcagttatgatgaaagtatttgtggcacaaaaattggcaaatgctacaaattacccctacccccctgacaactggttgttaaacatttgccagcacaacacaactcagcctcatattgaaagcccctttcagtaataccactttctgatcacccaggaaagaagtggtctgcagctattactgacagccttgatctttctatttttctttaataaaatgaaaatattaaatttttatgtggacagggttagcaattttcgaattattttgttgcatggggagaaaatgtctgatagagcatgagcactccacttcccttcagaggtagtttttgacaatgtattggtgtttaggagacagcgtggtgcagtaccgtactaaaccacagagagacactgttcccacacattttttcctggcgtcccctgaagtcacagactcctagaagggactactcagcagcccagattcttaaatagtttttaactgtaggttgctacacacaaactattaacgggtgttgtctcaagagcaagtaaaattaggtataacttcactgtctttgctttgttttatatttacttatggcaattgttttacctttgtaaccaggaaaaaaaatatgtataaaaaaatgaattctgaggttgtgatttccagatgtctggcttacctttccatggttggttgactgttaagccatggtttgtgtattttagatcgccgatcgcaactgcagccgaatgtcttactattgctctggcagtagtgatgctccaagttcacctgcagccccaaggccagccagcaaaaaggtactgaagagagcaatgtgaggttcatcccaggataagaacagaaggatttcctcatgccctcacactgtgcttgggaatagtcaaagtgctcccctgcctgtccctgatgtgctaacacacacacaccccacacacacttttgcagccctgtcctttacgccacatttgaccacctaattgcccattaactcagtgtttctcccactttctcatgcatcagaattacctggaagccttgttaaaactcatcgctggaccctacctcctgagtttctgattcaatagatctgagctggaggctcaagaatttgcatttctaacaagttcccagctgatgctggtccagggaccacattttgagaaccactgcattggcctccttttagtagagggaaagctgggcacaagtcatccttgacaaaagtgaatggcaataattaggtatcatttgtttcaataccatataaactaatatgaaatgcttcctcataattcttcacaatcagccttacctatgagttcagaaactttaaaagctgttaaactgcttaccaggatttttaaagcaacaaaattccccaatcatagtcccagcctatgtggtctgagggatggagggaaaaaaaactgtctgccctaatttcctctcttctaggcactcaagaatctcaccattatagtagctacttaagtttttaatgtctttgaagacctgtattaaaatgtaaatatggcagggcacagtggttcatacctgtattcccagcactttcggaggccgaggtgggtggatcacctgaggtcaggagttcaagataagcctggccaacatggtgaaaccccctcctactaaagatacaaaaactagccgggcatgatggcaggcacctgtaatctcagctactcaggaggctgaggcaggagaatcacttgaacacgggaggcagaggctgcagtgagctgagatcgtgccactgcactccagcctgggcgacagaatgagactccatttcaaaaaaaaaaaaaaagaaaaaaagggtaaatatgcttattgcaaaggataacacaggaagccatttgcaagagctgacatcacagggaaatgtttattaaacaggcaaggagggaatgagcctccccaagtctccctttggactggatgagggaaagaccaagtgtgggagggccggggcctggtgctgtgcactttgcagtattccaggcaccatatgtctagtgagaggtaccaggatttaactataaaaggaaaagtgaaaaaagatatggttaggctaaaaacaaattagtccacttgctctaaaatttaatattaggctatcacaggccctatgcagtgactggttataggtattataccattttcctttcttaaaaaccattatttgcctacagcctgacttctttaacccatgtcctgtttggtttcgcagttgccatgttttgacttgaaatgaccagaatagagacattttatttcaaagggaagtttggccaatatgtttccttaataccttagcagacagagttttgctgcttggctattttatataacctccagagcaaggtgttcttgtaataatgctgcccagaaagcagcatgaattactttaagaagcagcttatccttgtctaatctcttcttgccataagaccctggcagacaaactgacctattttctagaggcgacctttgaagctgggggagcatgtctttcctacaatgagaagatcaaggtgtagtccagttataatatgtgcacagttagaccacctgctagactaaaactcaaccccacgcctctctcaagtgagacagcttcacttcagactcacaacagcaaacaaatgtgttaacgcatattaaaattattaaggtttgactaacctcacaaaacgaagtgaaaccagtcgataagctgaaacacctaagcattctccattcctcaccactaacccgcctgggatctaattggttaaaatacccaagcatgtatacagagattttccttttgtcatcttttagtttagctaagtagctctcaaattttaatgtacgcaagaattagtacattgggttgcatgcgtactggactctgtgggtaatttttttttttttttgaaacagagtctcacttactctgtcacccaggctggagtgccgtggtgcaatcttggctcactgcaacctctgcctcccaggtttaagtgattctcctgcctcagcctccagagtagctgggattacaaccgtgaaccaccacatctggctaatttttgtatttttagtatagatggggtttcaccatgttgaccaggctcgtctcaaactcctgacctcaagtaatctgcctcctcggcctcccaaagtgctaggattacaggcatgagtcaacacacctagccctctgtggataatttaaacgactgtcaagagcaatgtttgctgtaatcagtttttgctttaggtgttgactttaaaacttaatttgcaaataaggatatgatattagggtgttcaaatagctttagctttcttacctactttcttaccagaaaaaaaaaatgagtttatctacgtttattccaggttttgtgggcataagatgaaagaaaaccacagaaaattcccagacatcatttttggcattaattagggtgaccaactgttctcatttgcccaggactgagggagtccccaagatgtaaggttttctattttaggaccaggacattatcaggcacactgtaatggattgattgccctacctttagtcttgaacttcttcctcatcaaaatgattgtcaggaatatgaacacatagccagatatgctgtagaatggaaaaggtataagtcaccctgtgcactatttgctactgagcagtaggtgacttgaagggaagtgaagacgcaaagtggagctgggggactttccaagcatctggccctgggacatagacatttagatgttgtaagttaaggctgatactactatgcctttcagagcccaagatcctctcataaaccccaccgatcctgcttcccacaatgccatatgggcattataaaaacaaaaattgtccagtctcctagagagtttagacaccatctagacagtggtccctaaagtgtaaccctggaccagcagcagcagcagcagcagcagcagcacccaggaacttgttagaaatgcaaattcccaggctattgaatcagaatatctgggggtggggccccccagtctgtgtttcatcaggccctgcaggagattctgatacacagaggccgggcgtagtggctcacacccgtaatcccagcactttgggaggccaaggcgggtggattgcttgagctcaggagtttgagactaagtgggcagcatggcgaaaccccatctctaccaaaaaaaaagaaaaaagaaaaaactagctgggcttggtggtgcacgcctttagtcccagctacttgggactaaagtaggtgggaggattgcttgagccagggaagttgcagtgagcgagattacgccaccgcattccagcctgggcgacagagtgcagccctatctcaaaaaaaaaaaaagtttgagaactgctgccaccaaccaactgattttatggatgagaaaactgagggtgaagagaggaatggcttgcacatggtcacacagagagttttcagcaggacccaagaggaaagtaagacagtaccagttttaatggctacccagaatgtttcccccgtagaatagagtttcactcccaggctgagtccactccctcagatgtgtctgtcctgtgcagcactgaccccagccttctatgcaccgaaatgtcctccagtctcaggtgatctcagcactgactttgccatccaccacttactgcctagaacatctaagacacatgcttcaggaacgaacaagctattaaattggggggaataaaagaaaagaaaaaaagtgttggtgaataataatagcctttgtttcacagcctaatttttgtggttcttatttagcatttccatgaggagcttgcccttcagatggtggtcagcaccggaatggtgagagaaacagtcttcaagtatgcctggttcttctttgagcttctggtgagattcttgcgcgtttgtatctgtgctcaataggccaagagaagcacacagcagaaaggaattgacattttgttcactgagttgcccctgctgaaaacctggggtggtttcttgaaatctaataatctctcacccctcccatccttcttccactaaattgtgttgcttctaccatgaaaatctatcgccgtcctgtgagttctcatcaccttcaccactctccacctggccacacaccatcatctctcatgtgcctctcgcagtgacatcctctttttcctgcctgtatccatttttgctcttggcccacccattctgcacatggcagccaatactaaacagagaatgtcacgctccttttaaaaaccgatcgatgattttcactgcactgagaagaaagcacaaatttttatcatgacctaaaaagcccttgtatgattctgttgttttcctccctctctaacctcatctcacgccacattcccccatcattcagccacatggtcctcttttggtgctttgaagatgccaaggccattttggcctcacagccttttccagattctcttcctgctccctaactttcacctccgcacccccaacacacacagtttctattcttctctgtagatttcagcttcagtggaaccatccccaagaggccttttctgaccacctaatactgtaatatatcttcctctattatcctccttctgagcaccctatttatttctttcctagtggttatcacaatttctaattgttttttctgtctcagcggttagattttcaggatttgggtctctcttgtgtattatcccatctctagcctcagcacactgcttggtaccatgcaaggcccaattaatatctgttggaaaacagaatgaaatttgtatatctgtttatcctaaaacttctaccattactcgagcagaaaagcaaaaggtatagccataataccttaattttaaaataaggggaataatagtgataactatttttttgtttaattattaatggaagcaaaaggattttcccatagaggcactaaaaataaacattttctcaatgttgataaacagagatgcataatgagatgatgttgaatgaaagaggtctaaagacatagacaccaactatataaaaatatatatgcaaacagttcagaggatttggagtaggttgagatttagtgataatgttagctttatattcattgggttctttcccctgtcccattaagtgaatctttttttttttttttttttttttaaagagagtctaggctgggtgtggtggctcacacttgtaatcctagcactttgggaggctgaggcaggcaggtcacttgaagtcaagagttcgagaccagcctggccaacgtgacaaaacccatccctactaaaaatacaaaaattagccgggtgtggtggcgggtgcctgtaatcccatctactcaggaggctgaggcaggagaattgcttgaacctgggaggcagaggcagcagtgagctgagattgcgccattgcactgcagcctgggcaaaaagagcaaaactccatctaaaaaaaaaaaaaaaagagagagggactaaagagatgggaggggttccacctaagctctagtttttgtatgtaagttgaagcccaagaaaaagggagaaatgctgaacaataggacacagagaacaaagggcaaaggaaacaaatgaaccatccactggggaggaaataggaagcaatgtggaatagagttcagaagaagtcaggttcatgccacagaaacacacccaggattcaaatcccatgaagttttgcaaagtcccaacctctgttttgagaagggtcccaaagcatggtcccaaatccttgccacagaaccacctggaggtgcttagtaaaaataaagcagagattctttctcaaagcactaaaattaggaggctggaggccagcattgtgcatttacctgtcttctcaggtgacttctaagcctgttaatgatccactggtctacaccacctctgttctgtgaatcctatacagagctacaggtcttttggaatttgtactcagacaacaccagaatttttttttcattccaaaagccgagctaattaaggtggtggctgcagctcacaagtcttggggcaagagcattaacaatgagacatgagctccatgctctggcaggaaagggactgggccataagacccattcccctcttgtttcttgaggcatgagaagtatcaaaaccgtcaccccatgccctttatatcctgcttctatttacacatcccacccaccatcatgtctctccataaagaagattcactcagcctagctctgcaaaaatgaaaaaattacctgggtgtggtaacatgtgcttgtagtctcagttactcagcaggctgaggcaggagcgtcactggagcctaggagttcaaggctgcagtgagccttgatcatgccattgcactccagcctgggcaacagattgagaccctgtctcaaaaaaaaaaaaaaaaaaaaaaaaaaaaagaagaagaagaagaagattcacttgagtcataatccagctatggataattcatacaaataattcattcccaatgcggaattcagcattgcttattctgagtggttccatgtggcatcttagagctctctttccaaaggaagtttgcattctctgcaggtgtaatgatgtctctgttcttcacagaatcccaataatagttggcataccaatagttggcataccaatgggagaaagaataatcacatcaaaactactgagcatcttactatatatgtgccaggcagtgttttaagcattttaaagcatcatctaatgtaatcattatgcaatcttgaggcaggaggaacttttattatcccaaatttacagatggggttggaggaagggtggtggccataaagagagtctccaagtcagccaaatgcttcagcagtaccacttcactgcccctaactgcttttggccttgcacatttatttactagggcttcgttggcccaggagagaaagcataagctaaagcacatggcccatcttacctctaggaagtcccttatggtaaacagatgaagttttttgggaagaaagcccctgctgatctaagcatattgcaggggtttgtcaacatgcagatcacccaagacaccagttctaccagcagcctaaaacctaagtctgtcaggttctggcaggacagagtttccgttgcccaaaagggttaactgaaaagcattgatcaaaaggactctgctcagcatgtatgggaggttcaggggccaatgaggattggtgagagcccccagggtacagcagctggcagaagcctttctctatgctagctctaaagaatcaagagtatagcagagtaactggggcctagaaaaatctggaggcagatgagacaatcttagaaaaggagcctggggccttagaaaaatgttgccactaccaggacctcactgcagcagggatgagggcagtggaagtgagtaactacctgggcctctctgttctcccacgtaatgatccccttgtttgtgctcctgttggccaactccaactggaagccaaaggttaagggggcctgagtgatgtggtccctcgagacccccttcccagcattcagagacagacagagaaggacaagaaatccatcagggagctggggtaggggcaaatggaaactatcatcccccagccagaactttgcaaggaaattgatctcagactcagacaaggtgcccaattcttcatacattgtttatgcatttgcctgaccaatgcccaggaagttatttgaaaaccaaaacagttttgttttgtttttttccaagaagcttgagaaagacaacagcttccttggccttagccaacaacctgggcaatttaacaccctctagttgtgtcagtgcccaagcgctaatgaacaaccactttggcattagagctgttaaacacaatgcttgggcgactttcacacttgctaatgaataaaatccctgtgcttctagaaactgctgagccagaccttggagaaatagagataaatgggtgacctagtttactcactcaggacatgaagttccacattaaggggttctttagaggtacccttactttaaatgggccacaaaggcccatatagggggaaagatttctgtgcctcgccccactcaacagggccaggcctccactagtgtttctactggatgttcttctctggagatctggaggacacagtagctggcaagctgctgacagtctggaaagaggccattggttggaagtatggtattgtgagaattatgtatttggttgtaggatggccaaactcagcagacaggagccaaatacagcagtgagttctgaaagccttagtgctgggatggttagcctgcccagaatcaggattggcattgcccaaaacaaagaggccttatcttcttaagtcctttgttaggagcatagtgagagagaggcttttttcggacaaaaatgggtccagttcccacccttcattcgggtcttctcaccaggtgcatgcggccttgtgggatatgaagccatctctgtgtcccaaaccaaagaggatgccgccatgaggagaaaccatggtttctctactgagctttagggtttgatgtccttaggtcttccctgagctggccatggcgttgtctgaaaacatgaaacacataaagcctgtgtctctggttttttcttattttgccttccctttgttttttctgtttgtttccatgctaacaaaaattgccagtgctgcatgcatccttagaaactgaattctgctgttagtgtattaacgttctctcatgtagctcctgggagtggaagtcccctcttcttccagtctcaacacagagggcaaatgtgggtggttcaacttccagtgccattagtagtagtagtagtagtagtagtagtagtagtattgcagtggctgtctgactaatctagacgcatacatgaaaacgttttcagagtgtagggacccaaccacaagaccttctagtcttccccatgttcctaatagtgtaagcaacttccaacaaggataagactcaccctcagatggtgacaagggggcccatattgacctgtgaatctcctggccccaagaagatgtccaaaaaataagcatgatcttgatttaaaattgtggtaggcattgagatagtattattctagtcataatgcagacagtcaccaattgacacaaggatatctatatatagatacgatatgtatatgtatgtatatccatatagatatatctgtatataaatatctttctgtcagttgacgaattgtttgcattatatatgtaaccacagtatacaccagtttgtgtcaattggtgacttgtattgacacaaagatatctatatagagatactagatatagatagataatctgtatatagatatttttgtgtcatttggtgactgtctgcattatgtaactaaaaattagacttatggaactcaaaatttcccctagaggtaatgttttccctggaggcaatgttctaaatagtggttctgtttccagctggccaacatttcctgctcaatatataatatagctaaaatttataggagcagaagataactgctggaaactatagaactgtttctggaaaaactgtgctccctcgagaaacactgaaactcaagataggaggaacatttctcccacgttctccttactgtagtttcaggaacagaaaagactttagttcgcatcaagaaccttgtgataaactgttcctttctgagtcatgtgttctgtcctatgatagaggacacctagctggttacaggagcccagctcaggtctgccttccaggatgtaggcagttgagaacactgtagctaaagaattaagctcctggctttgtcagcagcaagaagggagcctctgacttggggtcaaaaagaggacacccttcccacctcccgccaccatggtaaccattggtgtgtctgcagcattttagtccagagcttgctcgggcaccaccagcacagataaagtgtcagaaaatccattgttagagagcatttctgtgagtctttcccccttttctgcattgtacaagcaggtcaccaatctccatgttgacatttcctccatccccctccgcaggtgaaaagcatggcccagcacgtacataacatggacaaacgggacagttttcggaggactcgtttttctgaccgtttcatggatgacataactactattgttaatgtggtcacctcggaaattgcagcccttttagtaaaaccacagaaggtaactgtattttactctttattttctaaattgtttacctggaacatatattactttcataatcagagaaaaataagcatcattttaaaacaataattaaaatataactgtaatgacagttaaacgcagtatgttatactggactggaccctgatgtggggctggaaaattgttataaacaaattacacacatgaggccaggggttcgagacctgcctggccaacatggtgacatggtgagaccctgtctctactaaaaatataaaaattagctgagcatggttgtgcatatctgtaatcccagcaactgggaggcagaagcaagagaactgcttgaacctgggagacagaggttgcagtgagccgagatggtgccacagcactccagcctgggtgacagagtgagactctgtctcaaaaaaaaaaaaaaaaagaaattgcaatatggactgtggtttaaatgatcatatcaggctgggtgcagtggctcacacctgtaatcccagcactttgggaggcaagggtggtcagatcacttgaggtcaggcattcgagaccagcctggccaacatgttgaaaccccgtctctactaaaaatatggaaaattagccgggtgtagtggcacgtacctgtaatcccagcttctcgggaggctgaggtggaagaatcgcttgagcccaggaggcggaggttgcagtgagccgagatggtaccacagcactccagcctgggtgacagagtgagactccatctaaaagaaaaatgtagatatgaaagataatatttttgctcttaggaaatacaccttgaagtgttatggggtaaatgggcatgatatttgcaacccattctcaaatggttcagaaaaaaatgtttttatgttcatagaatgataaaacaaatgtagcaaaatgtcaagtattgataagcttcgttaaagggtatacagtagttctttgtactattcttgcaccttttctgtaagtttaaaattgtttcagaataaaagctaaaacatatataaaatggaataaatcaaatgtttaaaaggcagctacaaaaatcttaggaagcaatgtttattattaatcgctttgtcgttattgagaatgtgcatagtaccaagtgctcaggagattttcattcggttattcctcatggcaaactttgttggaacagcatggtatctccacattggcaggtgtgagaataaggcacagtgaggttgataaattttccaaaagtcacacacagccagcagtaaagccaagactggagattttagacccagatactgagtcacgtaaggcacccaggaggagtggccatgtggagaatgcggagagagttcgaggacctctcagcggcacggtagcaacctctttatcaggtccccatccatcccagtgacttgactggtcagcatggcctgaatttgcaaattgcatgttaacaaaagcaaaatagtttcaaaccatatttttaatagtgtcaaaggaaattgatttgtcattctgagaataaaggacataaacatgaaaaactgaatcccagattgctctgaagcactgtaaaatccctcataaacaggagcactgagaaataatacaaattaaaaattttaaaaataggcgtagcttattaattgggattcatggaggaatttaccctacggagtgaatacaccctgcggagtatgactctgacctctcttaggctggaaatgctgcctaattgaggaataaatttcttaggtaaaaactaattcttttatcctgattggattttctgtaataatccttaaaaattaagaaactgtctcattgaaaacagtaagtatttttcaagtcagtttgccaaaaaaaaagaaaatagttacaaaaaaaaaagttaccaggatataaaaaaaagtaggatccaacatagtatatagagaatgaggttaattatacacatataaatatgcatgtagaaaaaaaagtgactggaaggaaatgcacctaaatattaacagtgcacgaataattacttgattcaacctcacagtcatggctttagttaaaggagactcaactacttcgcccagtgccacccagaaggacagtggctgaaataataggacctgtctctcccaatgttcccaccagtgacctggaagttcaaatccagagtgtcccacaaaatgatttgggtgtttgtttgtttttaaggaaaatgaacaggcggaaaagatgaacatcagcctggctttcttcttgtatgaccttctctccctcatggatcggggctttgtgtttaacctcatcagacattattgcagccaggtgagtgtcccccccacccccacccccgagcgagccacttggttccttctcatataatgtgatgttcgttgccatggcacgctgtcttcttcattactgagttggcatgaatcctacacatcctgtgttttgcagcacgtccctcatgtctgtgccatggacattcctcagacatgctggtttaccttgattcctggagcatttaccgacagtgtagaagggtcaacagattcatctgtgggaattaaaatttgtgatatgatctgaatcttcaatttgacattcaacagaaaattaacatggctatacagtgctttcagtctttgacaagtccttgcgctcccagtctgaggtctcttttcacatattagggtaattaattaaattgctgttgtgatgctccgacttgaaagaacctttttaaagtgttcttaaataaaatcattcaaagagatttaatttcactgagcacatagcaaatatttcataaaccaagtgcatctatcagtgccatccccccagatttttaaatggaattattcatgtgctgtctccctcaaactaccttaacaatagtaatataaatagcagttattgttgctgctcctctccttccatatccctaatctagccactagtaccatcattactgctactactaccaccagccaccaccattctcattagtcccatgcccactatcaccaccttctccaccatcaccacctcccaccacctccaccacctccaccatcaccaccacctccaccatcaccaccaccacctccaccatcaccacctccttcaccatcaccatcaccaccacctccaccatcaccaccaccacctccaccaccaccagcatcttcaccatcaccaccacctccaccatcaccaccaccaccacctccaccatcaccacctccttcaccatcaccatcaccaccacctccactatcaccaccacctccaccatcaccaccacctccaccatcaccaccacctccaccatcaccaccacttccttcaccaccaccaccatcttcaccgtcaccaccacctccaccaccaccacctcctccaccaccaccacctcctccaccatcaccacctccttcaccatcaccatcaccaccacctccaccatcaccaccaccacctccaccatcaccaccacctccaccaccaccagcatcttcaccatcaccaccacccacctccttcaccatcaccaccacctccaccatcaccaccaccacctccaccatcaccaccacctccaccaccaccagcatcttcaccatcaccaccaccacctccaccatcaccaccacctccaccatcaccaccaccacctccaccaccatcaccaccacctccaccatcaccaccacctccaccaccaccagcatcttcaccatcaccaccacctccaccaccaccaccacctccaccatcaccaccaccacctccaccaccaccagcatcttcaccatcaccaccacctccaccaccaccaccacctccaccatcaccaccacctccaccatcaccaccacctccaccatcaccatcaccaccacctccaccatcaccacctcctccaccatcaccaccacctccaccaccaccacctcccccactaccaacagctccttcaccatcaccacaacatccaccaccaccatcaccaccaccaccaccacctcctccaccatcaccacctcctccaccaccaccaccattagctccaccatgaccacctccttcacctccaccatcacttcttccaccatcatcattgtcaccatcatcaccaccaccacctccaccaccatcaccacctctcccatcaccaccacgttctctgtggttagtcacttagtgactttagataagtttttccaattttatgggtcttaatttcctcagttttaaaataagaagggggggttgagagatttgagggctgatcaacgaaaaggataggaccataaaaagcagtgacatacaagcttcattgagcagcacttggacagggttacataagagcggaagcccctcccagcatgagaacagccataggcctgcagtgaggaggggaccatccagaggagcaggggaactcccaggggagaggaggattagggcagaagcttatagatctgggtgaggctgctccacagcacagtagggagtctctgggtcagagagctccaagggctgtagcagcttagggccctgtatctgcaaggctctatcttatcattaggaaacagctgtccatcgagattttatggggtctgcaaaggaggcaggcactaaatggatgaaaatctgcttatatgagctatttttgttaatgactgggcatggtaaaatttgagttaggtatgagccaagggatcagcaccagtcgacagtgaagaaataaacaaccgaggggccaatacacagaaacaatctttgacttgtttacataacacctctcctccaaaaaaagaaaaagacatgacttttctaaaggaagtcctgtctacagccataccaccctgaacgcacgcagtctcatctaagggaagtcctgataaggaagcagaataataaaaaagaatcctaaggaaacatcagaagtccccaagcatccccatcccatgcaccctgacccctgccctgcagcggatcttctgtcccaggacccaccagaatagaatggcagagggacacttcactcctccttgccctccctcttcagtatttaggattccaggttagtctgttttcaaaactttaagttgagtgtatgaaagataccctagatcaccactgcagacccaggcttagctactcacatgcaggctatcttcattcccgacagggaaataaggcaacccaaggtagatatctgccttccctgcaaaactcatgtttttattttctctttctctttcctttcttttctcttgctcactatctttctccttaaattcttcccttttcttttagttaccatttctttttttgtttctctccttgactcaaatgccaaagatccctagaccaggagtcaagaagcctgcatgctgattcctgggacaccattaattacttctgtgattgggagcatcagcctttgaggcattcatttcctcatctgcaaaaaaactaggctggattagatttatccactgattctgtggtctgtgtctgccagtgacatccacggatgttacttagcaccattagtggcactcaggcctcagaaggtcactgacccccattcgtggtgatttaattcattgatcccagctctctagatacaggatgaacttcataccttaagcaagttgtattcttacaaagtcgtctgactttatcattttgcataacctattatgttttctgccatctaaagattttgtggcaatggatataaccttagtcttttttaatagtcactaaaaatagacaaatccatttcctcaattactgtctgtcacttacaatgtgccactaagcaaacacccatcccttgggtaggggcattgtgggtcttgacctttgggaaggaagtttttggaatgcaccttactcctcttttcaaaacatcactcaaattgtttttgaaatgtctattttttttcttttgagatggagtcttactctgttgcccaggccagagtgcagtggcacaattttggctcactgcaaactccgcctcacaggttcaagcgattctccttcctcaccctcccgagtagctgggattacaggtgtgtggcaccactccccgctaatttttgcatttttagtagagacagggtttcaccatgttggccagactggtcttgaactctggcctcaagtgatctgcctgcctctgcctcccgaagtgctgggattacaggtgtgagccaccacacccagcctgaaatgtctgtcttgaatgatgtctcaagggacctatgaaagatacccatagtggggccttcttttaagtgccaatgtgttgtgggttcaagttccgatagccggcttgacccgacacctgttaatgagtaacctaagtgacaggcacatgaccaagttctaatcccttcaatgtgctggtggctccactggtccaaagtcagccaggagtgcacatcgaaaggttatgggatctggtaactgtgcttacatagaagtcatatgttttggttttaaaataatatataatggcatttacttattttaagtggatgtctaactatgaattaattctgtaggcaatatgtcccacaacacattggcttcttgtaaaatggctgaaaatatgtgttcatttaaattatattgtttagtctgtaatcccagcactttgggaggccaaggcgggaggatcacctgaggccaggagttcgagaccagcttggccaatatggttaaaccccatctctactaaaaatacaaaaaattagctgggcatgttgatgtgcacctgtaatcccagctactcgggaggctgaggcaagagaatcgcttgaacctgggagatgaaggttgcagtgagccgagatcatgccactgcactccagttcaacagagcaagactctgtatctctctctctctctctctctctctctctctctctatatatatatatatatatatatacatatatatatatgtgtatatatatatgtgtatatatatatatgtatatatatatatatgtgtatatatatatatgtgtatatatatatatatatagtttaaaaaacaaactactcttgaagtgagtgaagaggaggcatgtctatcacaaggatgatgcttcatatttctgtgctggggtggggggtgataatgatgaaatattgaggagctcaaggtgcatcagcgccccttccttcccctattttgcctttagaggagctgcctctgagtctgggtctttcagttgttcagcttgcctgggggaagcaaggggtctcttccagacagtcacctttttctgcttttcattgcttgcttcatggtttattttttaaaggaagatttttcctaaaaactcttctagctttctttctctttcttctccatttcctcctctctcagtctgggacaagctccttgagttttttgcaggtactatgtactttgctaaacagtttgatgcctttctctagggaactggttctacaactttccaatggggcctttaattagaaactacgagagaacacttgtagtataaaagtcatctagtcatattctattagtttcatacaggctcatatgaggtcaactcctttcatttagtttctcgaacatagtagagtttttgtaaaattaattatgttacggtgaagatgtacctcaagattttcagcacaggcttcccatggtattaaagatttgataaagtggaaatcgggataagaatcctcattctggacagctactaggctagaatcactaaggggaacagtaatgaatgaaaatttattagacctctctgtaatgcagaatttaccatctgttgcactatcccattagtttttattaaattgattgccttaacctggagagaaaggatatttttgtgtctgccaacctcaactccacttaccttgtaataaatgtttcattcctcttttcatttttcttcccagctgtcagccaagctcagtaaccttccaacgctcatttccatgaggctagagttcctgagaatcctctgtagccatgagcattacctcaatctgaaccttttttttatgaatgctgatactgctccaacatctccttgtccttccatatcttcccaggtaataaaagaattatttaactaaaagaattattcaagctatttcatttaactagctcagtttaatcatgtatttcctataaaggttagtcttattaatttgacaaaaaatcaaacaattcaaaccagatcaagtatgctaccctgaagttacaccactagctaagaattaacaatctaagtaattggtttctccccaggctcaaggctccctgatcaggttaagtaaagccaagaatccaataagccctatgaaatttagaaactcatagaaaagtctcaaatcttcctttgtctgacattagccaattgttatattatgcaaatagaggattccaaagtaaataagttttggaaaccatgtattcaccaggtttctttgcagcaggccctctaagaggttttaacttgttcatgtcaattgcaaatgcacgagaagcagaagaggaaatgggaggaggtgtgcatgataagcagtgattccccaaatgatttaacatggaaaccccaccccacctcatacattttttgaaatgttactctggaataactttaagaacatgctgtttgatagtcacattccatttatagggaacacatcagtagctcagagcatcaggcaaaatttctcattattaggttatatttctgttgcatattccttgatactagtacaaaagtgaaggcttgtcttactaattgaaaaaaaaatcttagccatatatgccatatggcatgatccagatattagctacatgaccatcttactgtgaacagggaaagatctgactcacaagcagcaattcaaaatgtataaactttttgctccatcctgcccagcagcttaagtcctaaaacttccctggactaagcttaccctaggttctttcccaccttccccttctgactgccccagggagtggccaaacccaggggccaggctcacaaaaccatgaaggatttctaaagacactttagatgctcttaatgaaatataaagtgtgctcccaggatacaaatacaggacaggaattactgaggaccggtaaatctaatacttccctccctgacatcacttgtagttccaggccagcaaaagtctgacaatgtgcttaagccaaattcagaagtgtagctgaggccgggcacggtggctcacatttgtaatcccagcatcttcggaggccaaagggagtggaatacttgaggcaggagttaccagcctgaccaacatgatgaaaactcatatctactaaaaatacaaaaatgcatcaggtgtggtagtgtgactgtaatcccagctacttgggacgctgaggcatgagaattgcttgaacccgggagagggaggttgcagtgagctgagaccatgccactgcaatccagcctgggtaacagagtgacactctgtctttcaaaaaaaaaaaaaaaaaaaaaagaaggtacctgagtaagcagggccttaaacaaagggggcatttggttacagaggaattgcctgttcccagccccaggactgggtgaggttcttatttctctgtccaacttttatgctaggatttttatcttcagcttttgatttcaggtgggaaagggagcgtcattcatttttcaacagacccggggtgctttattttcatctttcccgctgggcagtcttctctctgtgggtatgggaaagtgcagtaaccactctgtgcctcagtttccttgtccgccttatctggcaccagagtacctacctcactggggagggctcacgaagcctggctggggcgaggactcagtaaacactggccatcgctattttcattccagttcttgtggctcataaaatggctccttacgtttctgtagaactcaagctcctgctccagcttccaggaccagaagatcgccagcatgttcgatctgacttccgagtaccgccagcagcacttcctcaccgggctcctcttcacagaactggctgctgccctggatgccgaaggggaagggtatgtttctggcatttaaaatggaagatgaagccaaaaaaacagatgttctttaataaaatttgcagtctagcttctcacacttggtaaaaaactctactgtagttgaccagttctgaggagtagaaacatctgtcttgagaatatggtacccataagcacaaggcacaagaaaggcctttcttgtgtagaaaggcaccagggatgggtaagaactacaaaatgacttttcttggtcaactatttcagtggaatttaccagttctgctatagcaggtttcccaaggatgctttgattagtgaactccctaggagcaaagccatttttaacaaaggggatagcatgcagaggcaaccacaagatgtcacttggttcaaagctgatgaaggaaataatggctgctgagaaggcagctgtcccatgcccagattaggtttcttgcagacagtgcttctcaggccaagagacaccacacatccagggcttctgaatccttttacctcttatctatctgattactcagggacatgtggcagtatctagcctagaagtcaacagacagagaggtagaccacccccttctttccttctctccctatgctccgtgagctcatggagtcagaaacccacagcctatctgattggactgaaaaagataatgccttctaaaatattattcattccgttcaacaattattgaatgccttccatgggacagacacagttaggtgttagagtacatcagagatatatcagtgcacaaaacagacaaaattcgctgcccctcaagagctcaccatccagggactcagattcaaagatgattaggattgcaaagtagttgagattcaacacttctggtgtttagattaggcatacagaattgcaggaacttgcccactattccataacagagaacgaaatctaaagccatggtcttcccagtcccttcccaggacccactctcctataccaaaccatctccctgcacagggaacctgttcccatgactcctatgctaaagaggtttccagaataatgtttgctaattaatggtagcattgctgtatgttatggatggatttttatctaaatggaatttctcaagttctctcaaagtgcttacaatttagtgaaggaaacaggaggttcctgcatgaaacaaatacaggagcacatcgagttcgtgcaactgcaacagtcacatgtgtcccaagctatgtacccaggctgacaccgctgaagtgactctatgtctgcgtctcctggcaggatagtgtggggaatctcatgcttttagctctcaattctgcctccttccagataaactggcctgagtatatcctttgagaacttcactttccatggcttcaattctatcttctcttctcaactctaactaaatttctcccaattatctcagtagaatgttctaccctacaactaacataaatttccacagcaacaaaaagtgcaccgaacacttatgctaataagtaagatactgagaagaaagtttgaacacaaagaaaattgccttcatgcacaaacatgtacatacattttcttagttgtcctttaatagcagtactttaagtgatttctagaaacatctttagtatttacaatagcgtagtttctattttctattttcattctagctggaaacagccatgacattctgttctggattccttgtaaaattgttgctgttatattactagcaacaaggtagagtatattcagagataatcatgtaattatgtttaatcaggtagatacattcttcaaacacacacacacacacacacacacacgcacacacgcgcgtgcacatgcacacacacagtaccctttctcccccaaaagagtaattaacagtgtaactcctttggcaacacagtaatccctgattgctgggttgtcagttactctcctggaaagtcattagatacactgtcacaacttcatcatgtaagctaaaacctcagaaaaatgtcatgcttcaacaatacttcctattgatcagcacttcctttttttttttcttttgcttccaagacagttggtagacttgccaacacctgtacatccatggggcaagggccagaaggacgcatctcagtacctgaacccctagggagctacagctccagtttccactgggtttcccttggatctctgacacctgggtatatccacaagtgtctatgcatcgttaaatccacagtgtttttcaagcatttagaaattgtctatcatctttgtgttaagccagcaaattgcaatgcctaattcaaaacacaacccattgccgggaccacagactaagaacaagaaaaacttttgaaatgcaatttacaattatcttactttagccacagtgcaagagtctgagtcatttaaaattttggttaatattttctatataacgttgaattctgatgtagccttattttgtttgaaagaaaaaaatgtatatatatgtatatattttttaaatctggattctttttttattattatcatactttaagttctagggtacatgtatacaacatgcaggtttgttacatatgtatatatgcgccatgttggtgtgctgcacccattaactcgtcatttacattaggtatatctcctaatgctgtccctccccactccccccaccccatgacagtccccggtgtgtgatgttcccacctatgagtgagaacatgcggtgtttggttttctgtccttgcgatagtttgctgagaatgacggttttcagcttcatccatgtccctacaaaggacatgaactcatccttttttatggctgcatagtattccatggtgtatatgtgccacattttcttaatccagtctaccattgatggacatttgggttggttccaagtctttgctattgtgaatagtgccgcaataaaaggattataaatcatgctgctataaagacatatgcacacatatgtttattgcggcaagatgtatatttttaaaattgaacatctatgactaggttccagatactccactatatattttatttactttttattatagtataatttatataaagaacctgaatcctaagtgtaaagtgcgattaatatttcctgtgaatatatttgagtaaccaccagtcagataaaaaatataatattccattatcctctctcagttacaggcccccctcaagtaaccactattctgactcttattattagaaattaatactgcctgttgttgaatttcatagtcttttgctgaatgttgtgactgtgacatcctttagtgtggtcgcatgtgtcagtattcattttttttcaactgtatgtcatattcctttgtctactataatttctcttctgtaaattgacatttgggctgctttctatttgtgggtattgggtattatgaaaacagctgccgtgaacatgcctgtgcatggttttgggtggacgttagaactcatttctttggggctataaatacagcctattttttattttaatatactgctcttgaatagtttaataaatatgtgtacatggtcttaacaaaatgtcaaaagaatatactctgagctaggaaaagaagagcaaacaagtcaaagcaggaagatggcagggaataacaaaggtgatagccaaaataaatgaaataaagaatagaaaaacaatcacggaaatccgcaagatgaaaagcttgttatttgaaaagagcaacaaaattcaccaatctttagctgagctgaccaagaaaaaaggaagaagactcaattactaaaatcataattgaaagattcaacacaatcatatcacaagagaccttacagaaataaaaaggattataaaagaatacgatgaacaattgaaagccatcaaattgataacctagattaaatggataaattccttaaaaggtacaaagtactaaaattgactccaagaagatatagaaaatccaaatagacctacagaagtaaaaagattgagttagtaatcaaacttcccacatacacctactatgtacccacacaaattaaaaatttaggctgggcgcagtggctcatacctgtaatcccagcactttgggtggccaaggcgagtggatcacctgaggtcaagagttcaagaccagcctggccaaggtgatgaaaccccgtctctactaaaaatacaaaaattagctgggtgtggtggcgggaacctgtaatcccatctactcgggaggctgaggcagaagaatcatttgagactggaaggcagaggttgcagtgagccaagatcatgccaatgcactccagcctgggcaacaagagcaaaactccatcacaaataataataataataataatatattttaaaatttaaaacttcctacaataaaagctcaaacctggggggctttactgatgaattctaccaaatatttttaaaagaattaattctaattttttaccaacttccagtcttctcttccaacgaatggaagaggtggaatacttccccacttgttctatgaagctagcattaccctatactaaaccagacaaagacatcatgagaaaactacaggccagtatctgatgaatatagatgtaagaccctcaacaaacactagcaaactgaatccaacagcatataaaaaggattatacaccatggctaagtaggatttatctcaggaatgcaagataggctgcatacctgaaaatcaattgttgtaccatattaataaaataaaggacaaaacccatacaatcatcttagtagatgcaaagaaaagcatttaataaaatctaataacgcttcctgataaaaacactcaacaaaccttttaggaaataagagaacttcctcaacttgacttaagggcctctatgaaaaatccacagctaatgtgacacttattagtgaaaaacagtgctttatccctaagattaggaacaagacaaaaatgtctacccttgccacttctattcaacatattaggagttctatctagggcaattaggcaaaaaaataaaacaaaagacatctaggccaggcgtggtggctcacgcctgtaatcccagcactttgggaggccaaagtggacagatcgctttgagcccaggagactgagaacaccctgagcaacatggcaaaacgccatctctacaagaaatacaaaaattagctgggcattggtggcttgtgtttgtagtcccagctacttgggaggttgaggctggagaattgcttgatcccagaaagcggaggttgtagtgagctgagatcacgctactgcactccagcctgggccacagagtaagaccctgtctcaaaaaaaaaaaaaaaaagaaaaagaagaaaagaaaagaaagcatttaaattggaaaagaagtaaaactatctctattcataggtggcataatcttgtttatagaaaaccataaggaatccacaaaaaactccattacaactaataaatgaattcagcagtgttgcatggtataagatcaacatacaagaatcaattgtgtttctatacacttacgatgagcaatctgaaaatgaaattaagaaaacaatttcatataaaatagcatcacaaagaaaaaatatttaggaataaatgtaacaaaagaaacacaagagttatacactaaaaatgacaaaacactgttgaaagaaagatataaataaatggaggatatcatatgttcatgaatcagaagacttattattaaaatagcaatactccccaaattgatccatagattaaatgcagttcttctcagaattctagcttgcttttttttttttttggcagaaattagcaaactgatcctaaaattcgtgtggaaattcaagggacccagtatagccaaaacaaccttgaaaaacaagaacaaaattggaggactcacacttcccaatttcaaaacttactacaaagcaaaagtagtcaagactatggggttctgacatatgatagacatatagatcaatgaaattgggttaagagtccaaaaataaatcttcatatttatagtcaattgatttttgacaagagtgccaaaacaattcaatgggggaaaatagaattttcaataaatggtgttgggacaactgggtatccacactcaaaagaatgaagttggaccctatattacactgtatacaaaaactaactcaaatagatcaaagacctaaatgtaagagctaaaactataaaattgttacataaaattatagaggtaatcatcatagacttagaaaaggcagtggtttcttagatatgacacactcgaaagtatgagtaacaagaaaaaaatagataactggacttcagtaaaattaaaacttttgtgatttataggacaccatcaaaaaaatgaaaaggcaacacacaaaatgggagaaaatatttgcaaatcaaaaacctaataggggacttgtatctggaatatatattttaaaatcttacaactcagtaataaaaagacaaataactcagttttttaaaaggcaaaagatcagaatagacatttctccaaagaagatacagccataagaccatgaagatgttcagcatcattagccgtcagggagatgcatattaaaatcacaattaaataccacttgatacccacgaagatggatataataaaaaagacaggtaataaagtgttggcaagaataaaatggagtcttcagacactgctggtgggaatgtaaaattgtgcagccaccgttgaaaacaacttgctgattcctctaaaagttaaacagaggctgggcgctcggcggctcacgcctataatctcagcactttgggaggctgaggtgggcagatcatttgaggccaggagttcgagaccagcctggccaagatggtgaaaccctgtctctactaaaaatacaaaaattagccaggtgtggtggcaggtgcctgtagtccccgctacttgggaggctgagtcagaagaattgcttgaacccaggaggtggaggttgcagtgagccgagatcgtgtcattgcactccagcctgaacaactccatgtcaaaaaaaaaaaaaagttaaacagacagttaccatacaagccagcaaatgtactctgaggtatgtacccaagaaaagtaaaacttaaaacttgtatacacatactcatagcagcgttggtaagtcacaatagctcaaaagcagaaacaatccaaatgtttatcagttgatgaatggataaaattcaccaatggaatattatttagcaataaaaaggaatgaagtactgatgctacaatatgataaacttaaaaacatcatgctaaacagcagacccagggttagaacacaggcagtctgtttctggattctatgtagttctatcctatattgcttggttttccagggttagaacacaggcagtctgtttctggattctatatagttctatcctgtattgcttggttttccagggttagaacacaggcagtctgtttctggattctatgtagttctatcctgtattgcttggttttccagggttagaacacaggcagtctgtttctggattctatgtagttctatcctatattgcttggttttcacagtcacctcattgcttaggagcgttttcatcactcttgactgtttaagagctctttagtcaatttcctttcaccataacctcttgattcctgtgttgtgccaacagaatcagcaaagtacaaaggaaagctgtcagtgcaattcacagcctgctaagttctcacgacctggacccacgctgtgtcaaaccagaggtgaaggtcaaaatcgccgccctttacctacctttagttggcatcattttggatgctttgccacagctctgtgactttacaggtaatggcccttctgttttctttcttggattgttgggggcccctgccaaatgccccatccgaatgagatctctgtcattcgttccagtgctgatatgttcatatgagcaattcttcacaaaaatggtctccaaacctctttaacactggccccaatcagttaaaaaaacaaaaaaagtcacatagccccatatgtgttttttgtttagaaattatttacttgtttcttcattcattcatttattcattcattgatctgctagtatggaatgaactttataaaccatacaccacaaaggatgaaataataacaagattactgcctttggagatcgtgctctaacaccttgaaataaaggtgttccttcccttttcttttatgaatatgtaagcaaaaaagcggtctcaaatgaacccaactaattgctccatgcaaaaaaaaaatcatggcatatgtcaatattagaaaattctatcatagcagagaaatattgcccttggcactaagtgactaattttgaggttaatatgtctagattagcaacaagatgaaaggataagttgtcttaaaggggttttgtgaaaccccagaatctatttacaaattacattgtggattaaggaatgtagagggaaaaaaatcctcccaaatagaagaacttcttatgttgacctgagaaaggcagtccattggcctaccctctccacagcgtacgtgtgtgtgcacgtgtgtgcgcgcgtgcacacacacacacacacaattcctatcccatcagagtagttcttgcttttcctccagctcaagggaagttttggaaatgtccatgctgctctcttggcagctgaagggtgctgggatctgggcaatgcttccctgagccagcctctttatagtcagtcatccttgaaatcttggaaccatccaggttttcccacctcctccaaatggaaagtgtcatgtgtgactaaattgtttataatactattacggtgacaagtatttagttcatgaaaatgggaccaaacgcctatagtctttaattcatacaaatcataaaatgaaaagcaagtattcctgtggaagtaattctctcctttcttgaaaaaaatcctctagcaaactgctaatggagtaactcagaagagaaaggttgagacaggggttagggtttgtagagttctgttggggccagagtgcaaggaaatgatagaaacaagctcagcacacagggctgagcaagctgcaccatgaggtcagcagcttcctctagcagcgcctgattgcgcggaattgaaaatggagttgtttttaacatttacagacataatgcagagcatggcatgtgacttgtagcccattttgagaatccttgatggcaagtttctaaaaagttccatttcaagagcttgcttgttcccaaagccaggaaccactttagcacacattatccgaagttttcttgtcaattagaatattccgtatcagtgactcggaatcagaacttttcaacatttggtctccaagccttttaaacctcaaagacttctttgtatatgcgttgaactttatgatcatgatgtagctgatgagagaaaaaaacagtgaaaagtattttattgttataggttacacagtacatctattaaatatggaatctttaggttgataaactcataagaatacagtctttcaaaaagatgcatctgaattcagattccagccccatttattaatataagtgacctttgaaaggctcaacctttccgtgccttcctttcctctgtaaactataaaaatgtgataacgatgtctaccttttaggtttacgataaaggtgaaactagagaacttctataaaagcattttgcacagcacatgtttgtatctttcccgatttttcttgtaactataaccctatggcaattaaggggaaataagaatgtgtctctatgttagttgtgataatgttatcaggtcttgcataatttccatgtgctgtttatttaaccatttgtttaaaatcccaatggccttaataagtatttctaaaaattgggttttggctcggtgtggtggctcacccctgtaatcccagcactttgggaggccaaggtggacagatcacttgaggccaggggttcaagaccagcctggccaacatggcgaaaccctgtctccactaaaaatacaaaagttagccaggcgtggtggcgcacctgtaatcccagctactcgggaggctgaggtaggaggatggaggggcagagattgcagtgagcggagatggcgccactgcactccagcctggatgatagtgtgagactttgtctaaaaataaataaataaataaataataagaactgggttttgttttcacaactttagtagaagaaatgttatttacactcaaatttttctaaataattgaaggcccagatggctgtaatgtcaacaggtctagaaaaacatgaatttttaggaaaacatgagtgaatcaatcagttgtgaatgttttaccacacttttcccagaactgcttgaaatattaatagtttttgattgtatactggtagcattcttaaaaaccagacttttaaacggtttatcgtttttttgcttgcatacatctagacctatctataaatatgggtatgtctatattacatagatacaataaattgacattcattttaaacatttgaaatatgacaaattattgctgaacttgtgataatagcttattattctatataaggtagttgcttaattctgtaattgtaggtgtcttctatttggtcattatttaaaataatgccaattattagaatagagaatgaagtttaaaaaattatgttacaggaaacaattatggaaggtttgaaaactttttgttcacacaatttgaaaaattaatttctagcctaatcttgtgctagacattgtctcttagcctgctgtgttttcctataggtgatagcagatacataatgctaaacatcaggtttgaaattactgtgctgactttagtgactgagaagtatcagtctcttattgggtaggggacatggggaaatgtcatgtttgacttgacatcacaaacgatgttttcattgcagttgcagatactcgcagataccgcaccagtggctcggatgaagaacaagaaggagccggtgccattaaccagaatgtggctctggccatagcagggaataatttcaatttgaaaacaagtggaatagtgctgtcttccttggtatgttggtgcacatgtgtctggttgatttttcatttcatgtcttctgtcttctgttttgttttgtttgtttgtttgttttgagacagagtctcactctgttgcacaggctggagtgcagtggcgcaatctcagttcactgcaacctccgcctcccgggttcttcatgcctcagcctcctgattagctgggattacaggcgtgcaccaccacacctggctaattttttttgtatcttttagtagagacggggtttcgccatgttggccaggctggtctcaaactcccaacctcagatggtacacccacctcagcctcccaaagtgctgggattacaggcgtgagccactgtgcccagcctcttctgtcatcttctgatgggagaactcagcttagagcaggcattgattatttccgcctcattttgctggaaagaatcattgtgaggctggcagctgaggtgcacacaagtcagaaagggttctggcaacagcaagagatgtgcagatcaaattcaggcagtcccagtggtgctgagttcaagttcaagaaaccggaaaagaggaaaacttgggaaatctgaaatccttgcaaaggagatcaaaccaaggctctctgagggtggaggcttaggctgtgttcagtctatgtgtgtgtaattcatacagtgtaatgcctccaaaaaaaaagactgaaggaggctggtagcttagcgtaagggcttcttaaacaagactgcagcttttctaggaccccagggagcctaaggagggttgtttggctctgtccttttgcatggactctgtgggctcaaagaggggctcctctgggaatgtatcctctgattcagttgaggtgggattcatctctgttcattgatgagctctgactatcccttgtgaagacagcactgcatcctccaatgtcatttactttcacatttcaatgtagggtatagatgtgcagagaatttaactttcttctcccgtgagaaagcagcatcctgacctaactcttcttgctggatgactttcttgtcttccttcctgcacttagcaagctccatcaccatgaggattggggggacagtgaggcaggaagatgagacagagaaaagacatttgagatttgacatcaccgatcttactgttggagaaatattgtgtgacctcctccacctttctaatatccgtcttaccaaagttagctgcttgaggtggtatatgccttttacattatttgcctctaagggaaaaactcaaaagcccaaagttcacctgttagaacatagtccttgtgaggttgtatctcaagatttcctttattcttgtcaacaaactcagaataactaaagttaaagttgctttataacctctattatttccatccaaaactaacatttccctcccatacccacaaattcctcattgcaatttcaccagtacattccactggatattagctacgctgcatgaaccaagggtgcagcctcattgttgttgtttgtgttgatgagatgagtaacagagagtgcgctcagcactttaaaatgaatacttgtggccaaaatattaaagcaaatagcctgaacccccacaccccagccccaggcaaacataaattatggttaaacttccattacagagaactccacaaacatggatttgattaatttgctgagcagttcatgacccttatgttatactttgcactatgtaacaaagaagctaaatcttgaacagcaagcttattcatggcacccagccagtttccttctcccctgtaagtctaaccctctgctgcccagcacgaaggagaaatacttggagatcttagcagcatgaaagcctctttgtatcactgggattgcagcacgcatgatcaaggcccaggggtgatcaccaggccacactgctcctaagacagaggtactcagatacgtggctgaaagcctagctcaaatactgccccaggtgagcctctttgctgagtagcgctactcaaagaacacagcttcccctgcctagggaaggcagggctactggcaatagatctccagcctagcagtgatgtacagtcatggtattttaagagaacactttgaatttttctgttgcttgactgttaagcctcaaatttttctgttgcttgacttcttccctggcctccatcccccaatctgcctcccttcagccctataagcagtacaacatgctgaacgcggacactactcgcaacctcatgatctgcttcctctggatcatgaaaaatgctgatcagagcctcattaggaagtggattgctgacctgccatcaacgcagctcaacaggattttagatctacttttcatctgtgtgttatgttttgagtataaggtaagtctggagtggcacaactttataccagctcttatctctcaattgcaattctgtcttcttactcatcccctttgtttgggccatggaggcatcattaatttttctcatttctgtattcaaatccataacccatttgtaggtatagatatgatcatttcacagggaaaggatctctgccttctgcagagagaaccccatttctgttgacagagttttggcccataggatgctccagagcagcatctcagtgaagcacatgtcaaacttagctggcatcactgtggagtgtactgttttggtaactctccccatcaacggagatctcaccaaaggacatgtcctcctacctctgtcttgtccagggaaaacagagttctgacaaagtcagtacccaagtcctgcagaagtcaagggatgtcaaggcccggctggaagaggctttgctccgtggggaaggggccagaggggagatgatgcgccgccgggctccaggtgtgttggactggcccttccctgctctctgtcaagcagtttttcactgtttgtggggaggaatgtcctcccaacatgattagacaccattactttcttgagatatttacggtagtgtcagagacagcggattctgggagtctgtgtgtgacatttgtgttagccctgtgcctgtgagggaaagcgctgttctacaattgtaggaaccctgaaaacagcaccaaatgacatcttttaattaaaactcgttgatggtaaaaggtcacctctaagaatgtcagtcatggatgaggtggaaggtgtttccctcaaggctgaggcctttctatgtgacctttggctagtctatccggagcatggtcaagaaactgaacagttctggccccaagatcatcttctcgatcattcagggcactattagaatggaaccagttccctgaaatggcttcagagtgtcccagtcattcaaggattccaccacaggaggaatgatctcaaaaaggctgagcttgaatagaatgaaatccccaggtaccctcagtcttattcaccatgctcaaagtaaaacagagtgacagcttattgtattcgaagggacacagtggcagggaacttggagggagctcatagttttcagtggtggtcaggcaccctcatttgacacccatactttcatacccaataattcagtaagcccccagagtttcacaggaatcctctgctcatgagaaatgtctctctgacactcagaaaggcagaggttcttcttatattctagtctatcaatcaaagagcgggccaacttggacataggtgtggcgactttgtctcctaccagcaacctgcatggactctaattagcccgagaaatggtgctgaggcttctcagttgagcttgttatgaacttctggttatcttggagggtttcatgctaatcaaattcctatcatgcatttcttaactcctagggaacgaccgatttccaggcctaaatgaaaatttgagatggaagaaagagcagacacattggcggcaagctaatgagaagctagataagtgagtcactcggcaactttctgctacttttacctaaagtccaaaactatttttcccaggctgcttgtattactgaaacaactgcatccttccaagggttagaaaatgaaacatcattatctgtgtaaatacaattcatccagggacccaggataatcaaaggtatagggagttgtggtttccagctcttaaaaatttgtcacattgataagcatgtaaagaaaactaatatttctttagcaacctcagatggcttaataaaagcagctgattttgcagggagggtagcagggaaatagagaaagcaggacacggtgcctaggaccgtatactttcaaatcgatatttcctttctggaaatatgtacaagatatacattcagatatatttatgtcagtgctacttaaagttgttttttaaaattgaaaacattctaaatgctccagaatagaaaaatatatttaaaagttggattgccatcaaaatgttttaaaatcatcttaatgacatggggaaatgcttatgacataatgttaaatgaacaaaggcagggtagacacttggttttctagtagtgtgtggctcacgcctgtaatcccagcactttgggaggctgaggccggtggaacacctgaggtcagtagttcgagactagcctggccaacatggtgaaaccccgtctctacaaaaaatagaaaaattagctgggcatgatggcagatgcctgtaatcccagctactcaggaggctgaggaggaagagtcgcttgaacccgggaggcagaggttgcagtgagccaagatcgtgccattgcactccagcctgggtgacagagcaagactccatctcaaaaaaaaaaaaaaaaaaagaacctcaaatctctgatgacatatagtcaatgtattttttaaaggctagaaggaaatttaccaaaatattaattgcggttttctttgggtgctgggaatatcggtaattgatgttttctcttttatactttgctatgtttcctacagtagatgtgtattataatatatattgttaccagaaaaaaaattataaagaaatgaaagaataaaaaaacctgtttggatcaaaatctatgctatagatgaatagatatattgacgtgtattgctatatatgcaacaatttagacatatgaaagctaaaagtatatatgtttgactagatagcacatgtttccgataccgtttagccacaggtagcctaatgagtcccagggtttgctgagcaaaatgtcgtagagctaaaatcacccctcacacacagttgacaaggtaggataccccatgggtgatgaagcacccatcaaagggggtatggggcagacttgattagcagtgctgttttgtaaataaatgtgagttaatatctttattgttaccacaagaatgaatcattctggttaacttatgggactttggggagtcacatttattttaaaacattaaagaaataagtatatttttattatagatgtgacttggaaacccagttgttggtatcatgcctatttgctttgggtatgttattcttgcactaaattccctggactgatttataaaatacttggatcggagagtccatacattctacttcgggcaatgaacaacaactacaaaatatgcatgccgtgggtgctacagaattgcttaggtggtttagctcatctactctactagattaaaagaagacccctaagtaggcctgttttgcctgggctgtgtaaactggtgttttggaaaacctttcccttttgcttgcaggagcaacacaatattggtccttaccacgcatggcctaccggtttgctctaggttagttctcagccctgcgctacctggtgggctgctggttgtcagagctaatgattcacatctacaaattctcaggggctttgtgctttttttttttttttaaaagggaaaccatagtaaaattataactgttcaacctacctacctggaaaatttataattataataatggtgtctttcaccctctttctgatcatttttcgattattttggctctgtttcttttagagcaatgatcttcaacttaggctgcacattagaatcacctggggagctttaaaacctgtcagtgcccagctgcaccctagactacttcaattggaaactccagcaggacccagaaatcagtatttggtaaaacttcccaggtgattctattgccaccaaatccattgttttaaaggaatagatggtaagcttttcttttcttttttttttcttttctttttttgagacaaggtctcactctgtcacccaggctggaatacagtggcacaatcacagctcactgcagccttaccctcctggcctcaaacaatcctcccacctcagcctcccaagtagatgggactacaggtgtgtaccaccacaactgcttactttttgtattttttgtagagacagggtttcaccatgttgcccaggctggtctaaaactcctgggctcaagtgatccacctgttttaacctcccaaagtggtgggattacaggcatgagccactgcgcctggtcagatggtaaagcttttaaaaaaccagattagtgttagtgatggttgcacaatatgaatgtacttaacactactgaactgtatacttacaaatggttaagatggtaaatttttatgttaggtgtactttatcacaatacaaaaatttgggaaaaaacagattaggacactctagatttgtgctgtccaatacagtagccattagccacatgtgactatcaaatgcttgaaatatggctagttcaaattgagataataaatcaagataagtgaaaaatacgcaccagattttgaaggcttattgtgaataaaagaataaaatatttcactagtaatttttatattgcttacatggagacagtattttttatcttttaggataaacaaaatatattaaaaataatttcactttttctttacttttttaatgtggttaccacaatatataaaatgacatatgtggcccccattgtttctactagacagcattgctctaaatttaaaactaaactagcagtcaattaattaaaaaggatgataaggggccgggcacagtggctcacacctgtaatcccagcactttgggaggccgaggtaagtggatcacgaggtcaggagatcgagaccatcctggctaacgcggcgaaaccccgtctctactaaaaatacaaaaaagtagccgggcgcggtggcgggcgcctgtagtcccagctactcgggaggctgaagcaggagaatggcgtgaacccgggaagtggagcttgcggtgagccaagattgcgccactgcactctgcactccagcctgggcgacagagggagactccgtctcaaaaaaaaaaaaaaaaaaaaggatgatgaggttaaaatggtaaatttgatgttatgtgtactttatcacgatataaaaatttgatggctcatgcctgtggtcccagatactcaggaggctaaggcagagcatcacttgagcccaggagttcgaggcttcagtgagctatgatagtgccactgcactctagcctgggtgatagagcaagaccctgtctctaaggaaaaaaaaaaaaaaaaacttttagatttcatttattttacacatatattatcacttggaaaatgagaaaaagtgtcaagtggcttgggaccagagagcctatcctaaacatgaaaacaagtaaaacacacagaagtacttattttttgagtcctcagtggtatgtaagcagctgcagtgcccccattattaggttaatgggacgcaagaacaggtaagtggtaaccctggcccaggacatatgagctgatataatgataccccaaccccatggtaacatcttggctactgaggcatcttggtaaagtcaattcttcatacctccctttccttgcaactagatttggatgatgatacaaaatatccctttacagcttcacttagatttcataagaatggatgggctagcaaaaaaaaccattctgattccttaaagtgaaacctaatagaggagcgagcaccaggcaatttcccattccctagtgggcaatgaccagtaatgtccggcaggatattagatcacctgccctacaggaatacagtcttgtttcccaatggaaaaggacgaaagaccccacgcacttggctgagcaacctcaaggtgatctttgggaagttaagaggctgactctcccctgacttggctctgaagctccaccctttcctaacccagccgcatcactgccaagttcacatcacatccagtctcactctctctcgcatgttgcaggggcttccccttactcagatctagcaatggttttcatgcgtgaaatacagccatggccctgaggctttaggcaacaatctgagaggggagcttaattgctagtagcaactaataactgcttctctacccatagtgttatttttataattgtcctcatcattattaataatagtggggatgaggatgaccaggaaaccttacctagacagttgtttcgacaagacatgaatcacagaaggcacctgcactgtagttactcagggccagttgctctgttttcatttcaaggttgactattttggagatttctttacaccttggtgtatagattgccatcatgggaacctggccaggtttgacatgcgctttaatttgacctcttgttgtttcctagaacaaaggccgagttagatcaagaagccttgatcagtggcaatctggctacagaagcacatttaatcatcctggatatgcaggaaaacattatccaggtgaggaaaacaaacacccaatctgatttgttggccatgaatatgtttactagaataaggacttctttatgcaaaattgtgaaagacataaatgtgatcccatagtaccttttttaaaaaaatgaagttgagaagtttactatttacaacagtgtctaccttataaattccagagataccaaacattcttctggcttctttgacttagggcttacttggagagggttaggtgtttggccagctgaccctcttggttaaatctgtgtgagtatgtaccaagtttataatatggatgttgggtttatcgtttagtatctagaacagtagtggtaagtagaattttttctgatgggtcaactccagttgaatgatggtcactgtctgatatgggagctatgattatgactaggctaggtaaaaagagtgctaaatttgacaaatgatgtcttctttggacttaaatttgttaaggaaagtcatttgtaccatgaatttgccatccctgctgtagaaaaatatagctttgtgaactttgtaccatactaattttatcttctatgtgattatttccacaaattcccaagctgtctaggtaataatgagtttttaattaccctgaaaaatgagttcttacatgtttccattgagaagtcattcattagagtaggtccaggattgcttttagggctagaagaaatatcgttgaaacacagtgaaatcttaattctctaacttttgaattgtctaaaatcaaagtaatcatcatacaaaaataaacacaaaaagtatgtgatatttttgttgactttaatatctttgataacttaaatgcttggtatcacatttaccttatctttatatagcacaatattaggtgccaaatatctatactagcccccaaatatatttgcagttttcaaagaaagctgaaaccttttgttattatccttggtgttgttagtccttctgtaggtgataaacaagcttctatttagaaacattgctgccaccaagcagcccctgttgtactgggaagcccacaattgtgttttgcatcccataaggaaagctatgtcttgtatacaaagaaagaactttccaaaagatgtgacccaggatgagggagatgggccttataccttcatttaggaacccagaattaggtataaatcccaaactcattggaagcattgaaataaagccatttggaaataggtcttcagttcccatggttaatggatgatacccatggtggctcaccaaactcttaagactcaccactggacatggaacatcagcattactgagctaattgtcaggaacatccagttcattggcacagtgcagggattcaatgatgctgttcttccattcccccaggcgagctcggctctggactgtaaagacagcctgctgggaggtgttctgagggtgctggtgaattctctgaactgtgatcagagtaccacctacctgactcactgctttgcaacactccgtgctctcatcgccaaggtaaacttgggatgcttgttttcttcctcttaattaagagtaagattctcatctagcttcatacttctctcttcaggtggaccaaaagtcacagagcatattaagtggcatcacagtaaaggtcttaagtcttcctaggaagaaagcagatgccctgattctgtgggaagccaccatggagaggaaaagcagtggctcccatatttgaagtgtggacctaactctagaagtttaaaatggccattcgctgaaggtctatgacatgagaacagagatcaactgagtgacttagcaatttcactctttctctgtaatacctctgctgagtgagattaaatcctctatgtgacgcccattagtcttacaaaatgtcatgccataaaatgccaggaaggtcagaaatgaatttctcacggcctgaggaatgaggattatcctggggtaacatgcagattatttttccctttatttatttatttatttatttttgagactgagtctcgctctatcgcccaggctggagtgcagtggtaccatctcagctcactgcagcctctgcgccctgggctcaagcgattctcatgcctcagcctcctgagtattgggattataggcgtgtgccaccgcacccagctaatttttgtattattagtagagacagggtttcaccatgttggccaggctggtcttgaactcctgacctcaagtgatccacctgcctcagcctcccaaagcactgggattacaggcgtgagcccccgttcctggcctatttttccctttattgaagatctcaattggtgccttctacatggggtcttttaaatttaaaaagtaaaattcttctgctcatccttctcaggaccattttctctttcttcatcaccagtaatttcccaggaacccaagaaactcaggtttccttccatcatagttgtgatttcaccagtgaatgcgacctggctcacagtgcagttgataacacagctctgacccttttagctggacagttcattattaaatctcaagtctactccattgcttaaatccatcttctgattcacatagctcattatctttatggaataatgcattaactcttctaggctttttgcttgtccaaatggacatttgcatatttcaacggtccagaaagtgtatcaaactgccaagtgatgcctaatggccctttatgtctctcctagtttggagacttactctttgaagaggaggtggaacagtgtttcgacctatgtcaccaagtcctgcaccactgcagcagcagcatggatgtcacccggagccaagcctgtgccaccctttacctcctcatgaggttcagttttggagccaccagtgtaagagttcaaaccagctgagtgacctggaatcagtagagaaaaattgatgtaaagcatcagctgcgaaaaaaaataaggaaattttgcagtattgcagtttacttctgtcctgtgagaaagaaacaattgagtatgtagatagatagcagcttccattttaatttgcatctaaaagtgaattcatcagataaatgcagtggtctctatcagtgtgtttctaaaatagacagccaggggccaggaacgatggctttcacctataatcccagcactttgggaggccgaggtgagtggatcatttgaagtcaggagttcaagactagcctggccagcatggtgaaatcctgtctctactataaatacaaaaatagccagatgtgttggcgcatgcctgtaatccaagctacttgggaggctgaggcaggagaattgcttgaacctgggaggcagatattgcagtgagccgagattgccccatttcactccagcctggacaacagagtgagacttcatttcaaaaaataataataataaaataaaataaccaggtgcagtggctcatgtctgtaatcctagcacttcgggaggccaaggcaggcagatcagatgaggccaggagtccaagactagcctggccaacatggtgaaacccccgtctctacaatacaaaaaattagccgggtgtggtggcacacacgcccgtaatcttagctactggggaggctgaggcacgagaatcgcttgaacccaggaggcagaggttgtagtgagccaagattgtgccactgtattccagcctgagaccctgtctcaaaaaaaaaaaaagaaagaaagaaatggaagagtattttagattaaaagttatcatctgtgggggaaaaaatacaatagacaggttagaattcagaagagtgtttcctgtttctaaattctgactagctagtgccagaatgacctgtggaagaggattttaaatgatcggtgtcatctaacctgagttttattttaatattttatttatttatttattgagacagtgtcttgctctgtcacccaggctggagtgtagtggcactatcagagctcactgcagccttcaactcctgggctcaaatgatcctcctacttcagcctcccatgtagtaactgggattacaggcacgagccaccttacccagctaattttttttgcatttttgttgagacagggtcttgctgcatgcccaggctggtctagaacacctgagctcaagtgatcttccctcctcagccccccaaagtactgagattataggcatgagccatcctgcctagccaagacttgagttttattcaaagctacgaagactttggagttcagctttattatagaacagtcaagtttgctttagtttgtctagattttgataccttctttggaatttccatttgtggccatgttaataagtatgctcaagtgatatataaagataaattggcccatggaaaaaagtcagcctcctccaaatgtattagggatgattatttaaaagacattcctcaggggaccttgaggtagccatgtttttccatgggcctgtaaagaaagaagaaacaaaaccttgttgcttacccggagttcaaaatctcagaaatgctggccacagaagtcccctgatttatttatttagagacagggtctcgctctgtcaccgtggctggagtgcagtggcgagatcttggcccactgcaacctctgcctaccaggtttaagcaattctcctgcctcagcctctcgagtagctggaattacaggtgtccaccaccatgcccagctaatttttgtatttttagtagaggcggggttttgctgtgttgcccaggctgatcttgaactcctgagctcaagtgatccaccctccttggcctcccaaagtgctgggaggctgagccagaagtccctttcttttaataaagtttaaataaagtcccaagaagaaactcttggcacaaaaggatatactgtattcttggacccaactttataagaatcttccagcttgcagcacaaaggcagcccagtcctcaatgaaaatttaaagggagcctgacagatttatgtgagagcaatgtccatttaaaccatttaaacaacaatatgaatgttgtgcaaagtgtagctcccatttcattgagagaagaggaaataattaagacggggcaaaggaaacactgaggagttgtttgtgtctggccatgctgctttcagttatctactgctaagtgtgtcttatttacttcatcttttttttttttttcactgatgcagaattttgcaagagtaaagatgcaagtaaccatgtccctggcatctttggtgggaagagcaccagactttaatgaagagcacctgagaagatccttgaggacaattttggcctattcagaagaggacacagccatgcagatgactccttttcccacccaggtacaccgaagcacataccttgtctcatgcatgagtttgggatctgccaactattgtgtatgtatgtatgtacatatatacacaatttatatataaatatataacatttgcaagtatttattgtccaatatgcatgtgctctcagcactctgagaggttttaaaaagaaatacatccatcactgtccccagtctcaatatgctaacagtctatttggagtgctcagtctcaaaacaattaggaggcagtacaagacaagtgatacataagtgcaaactgtgtggtaaggagctaaatgctatggaaggttagaggaagagaggtcgtgatcaataaacaatctggtggccaggaaagcctgcagggagggatgacactaaaggctggggtaggattccgctaggcaggggaaaagtgagggggaaattgtgagtagttgaaacaatgaattgtttgtatctgtagggatggtaaagggaccagcttgtctggtgaggggtaaggaagggccgagtttgagagagcttgtaaacaaggttgtcctaaggaaatgtgtaaggacagtcatctcttccatgtccattacgatgaccgtggaactctagcctgtcccatttgtcttttaactccagctcctagcctgctctatggtagggtcttaattaagtgagaatgaatgaatgaatgttttcttttattcccttagtctgagaaccctatttccggagtctgttttgccctctcgggcaatgttgcatcctcattctcagaatctttttcctctcctctacatcaaatcgttcctctctcatttcatcttgaccatactcctttagttccatcatttatatagaggtattcaccaacaagaccaatcaaactatgggcagtttaataaaggtcttcagtgccttcacccaatgaaatgactctagtggtagaaattttaggagccctggcaagctggcagaggggaacggggataagacaacattctgtggctgagttacctgccagggtctctagatcaagccatagtctctccctgtttttgtactgcaggctcccctggacctccactgttggttttataattaagaataaatgattacaagaggttctaaaatctctgaagccctgggaagatccaggaggcttctgagacatggaactcaagctgaggtcctaagctgcttcctacttggtataaaaatccctgatattccagagtagagtttagaacttttcaggttacaaataactgaaactggttcaaactaatttaaacaaaaatgttggagatagagatagtatgaggattcaggcagatttctggatctcaagggccaacacacatccaggtctcataaactcctgggctggcgaagatgaaaactacagagtcaggtctagatgactccgccatccctagtctctgctgccctctgatccaacccttcccatggcttccccttgcatttcaatgtaatcctaactcttcacctgggactacaaagctaagattattttgaggcttacactttttgcaggtggaggaacttctctgtaatctgaatagcatcttatatgacacagtgaaaatgagggaatttcaggaagatcctgagatgcttatggatctcatgtacaggtaagctttcctgacacactcaagggacaccatttgggggtcgaggatttgtcactgtggagttcttactaatgtaatgatcacagctaacatggatatagtgatttggatgatagccaaataatatatagaaattaaacattcagagtaggttaattcatatgtaagttttcagaaggatctccctaatttaaagtgaggcataataatgttattaaatataataacattattaaatataataacactatcttctacttaccacagaatcagagaaagaataattaactgttataggaattattttccatatgcttttgttccaattatattcagacatacatatatagttttactttagaaatcattttttacgcgtagtttaaaagttggtcttccagtccttgttcaggagaaattacttacagaggcaaaattgttctgatgcaacatcatacaaagggcagtacttttgtcttctgttttattttgagagaaaggaaagaaaaggcagaaatttgcctgagagccattaaaatagacatcatgttatcaggtattttttccccataaggcttttactaagtactatttcttggaggtcagcacagcttaaacatggaataaaaatagttggactaataaatgttttcttctgtctcgttttctggaaatatagggcaaaatctcaggtggaggggtacagggaactcttggggagaaaaaaagaaaaggtcacacaaagtagaagaacagtgtcattaacccactgtcctcaaaactacttctcactcaatctgtcttcagaattgccaagagttaccaggcatctcctgatctgcggctgacctggctccagaacatggcagagaaacacaccaagaagaagtgctacacggaggctgccatgtgcctggtgcacgccgctgcgttagtggctgagtatctgagcatgctggaggaccacagctacctgcccgtgggcagtgtcagcttccaggtagggtgtgtgcagcttttcccttagagcagtggttctcaactggggcgattttgtcccccagccccagggacatttggcaatgtctagatacatttttggttatcacaactgggatgggtgagtaggtgctactggcatctgactggtagaagccaggatgctgtgaaacattctgcaataggagagctcccctgacaaagaattgtctggccccaaatgtctgtagtgctaaggttgaaaaattccaagttcatacattacatttgcttcttctaattgctttcccatcgtcgttgggttttttttaaattactgtttacaataatggcacctagccattattaatagcactttaggagacatttgcaaacactttcacatgcatggcttcatttgaacctccccgtaaagctgtgaggcaggtaggtagggaaggcggttattattcccacttcgcggatgagagaactgagagagcaagttttctaaggtcacttaaactctttttcaaagacttgtagttgacacagtatactgacattgtgaaagtttggaaaacattggataaatgattttcctcctggcccattcatttgattccactcttcaactttataggggcccactctccaatccaaaaatcaagaaagaatcaaattgacctgagaagggagacaaaaggctgaatcagtaccttcttaggataagctgaaaattacccacatttggcaaagggaaattgtctgccagacctaaaagctggctcggatggggatgctcagtggccacttaaagtgttcttactgaatagtttaatagtctttagagagagagaaaataaaaaagcacaatgttgggtactttttttgtaagagacatagtttgtagagatgaccatccctgaaaccatgaacaatatagctacagtaatagagtgtttttcaagccagactcacgaagtcatttacaagggtttgtattattcttgtttgaatttacatggctgattttatgaaaagctttgttcttgttattgttcttcaacacaattttgtgatgttgtatgaaccagaaagaaagaacaattcaaagtagcttccccaggcttagagaataagtcactgaaactatgctggtgcagccaagagcttctggttttccagaacacagcaaagctgggtattgcctcctatgaataactcctcctttcttatggtcctcaagaacaaaaatagtcattctgtgatttcatgcttggcaaatgaattttcttcttaattcagaaatgtttgttataaaagctgataattaaatctcatccaaaagcataaaaataacacctgatttcaaatcacatagaagtgtacaagaaagttataaaagttattttagatgtatttgcttcttttctcaaatttattttgaccatgtgatactatcaaaaataaatattatagtactactctttcaattcccaggaaattgtaaggtttagcacttcatattgtttcatttactaaattattttatacttcttttattccttttcccatgactatattttattttatatttatcacttaaatatcaattgcatttcattattgacttttatatttagtaagccttactgttctaattttacctagaattcagttgatttgctaataatgacatgccaaagtgaatcattattacacaatcaacagaaatattccacattattccgacatgggggcatacagctctatctgttcacatatatttatccattgattccttcttttagagaatatttattgaatacttattctgtcctcatgaacgttacattctaaccagagagacgtaatataactaattattccaatctttgttcagttataattatgagaaatactgttataaagaggcacaagatattgtgagcatttatggtccaggccctgtgggtcagggaagggtgaagaaggtgaaaaggaaggcagaagaaactgaagtgtgagggcttcttgatgtagaggaggcaatgagttaggtgttgtcagctacagaagagaagccaaattatattaatgtgtatgagtgaattcttacttctctcaaatgggacataccaaatcaatttggaaatgtagctggcaagtgaaaggacacccaacccagactgacagaaggtaaaaatggaatttatcagcccgtctgaggaatgtgagcctggagtagcacctgccatactggacctaggggcccaaacaatgtcagcagagctcactgtcatcaccacttcccatctctgccatctgttgtgtcagcttcattcttcacaggcttcccacaccacagtttaggtttacatctctaggttcaagtctaggagagaagagagatgcctcctttctagcagttgcagagaaagcctcagtgcatcttactgatcctgtctgaacatctgatcctgtgctcatccctgaaccagccatactggccagagaaatggagtgctctgatttactgaccccgggtcatgggtccacacctggaattatgggtgatttcttcccctaaatcaggatgccttactttatagaaggaggaaagaattctagacagcattaacaacagatgtccagtgttgattttgcaaatgctctgtgctttaattttcaaccttgttctgctccaatgaaatagagcttttggaaaagatttataaactagagataaataaatatgtgcaaggaaaataactttgaggtcactgaattccaggaaactgagatcactgaaattctgtgtcccagagtgcaatatttatttcacaactgtagatacggacacattcttagatactgctgttacttgtacctccctgatcctgaagccaagaaagtctgcagaatccttttcctctgactacagctaatgaggctacatagcttcaaatctgttcctctaatgtggaaaattgcatacattctaatagtattagtatcttgggttattaaatgctttcaactgaatttcttggatcttctgttgtcacagaaacatcataatacatagggcaggtttggaagaaagactggccacaaaggctttgagagcctcctcctatattcctaaaactacgttacagtattgcatgtgaagagatagggctatctatgacaactatgtcctgactgattgctaaggttgattcacatgatcttgctaaccaggccagaaggcagacagcttttagttcacaagccaactctgatcagttagtagtggctgactggagaactatgcttaagaatttcgagactatgtccaagctctggggaaaaagtgctacagttgattagttatgcctgccatgattacagcaataggaaggagtggcatgtgtgccacctgtttgtaatccctaaactgggaaggtttcccatttcttctgtttttcatatgcatttcttccatagctgtgagctaggaagaaaatgattcttgacctgtcacatattcactgccagggccagtgctagggtgaagaggcactcaccctcagggtcgagcgggtacaagatcagtacttccatggccctaaaagcgagtacctctctaaattttgtcttgggtttctcatttggttcaccccaaccatggtctctgcatgctctgctagaggctctaaacgcaatagtttatgtaaaggaaacaaatgcatggaaacaaaatgttcaggaagaacaaaaacacacacacagtaactgctgcaatgccatgaaaacttccttaatgaagacagcctcgcttgctgttgtcgtatgtcatggctgtttatctgagtcaactccagagtagcaacatacttcagaaaaacaccactgtaagtcagaggtccactcggtgaaacagggagcctagttaatgttaattgggtctttgccttttgaaaaccaggacaccagccctatgtcccttagggttgtttcactaaagtaactcagctgttgtgacattgaggtaagtgtcctttatacaaaatctcctaatggttaaaaagaaaaacgtgaggtttgaagaccagttgctcagtgcgcctcttctaaatgaatggcagacagatactctcggggtagaattacagacctagtttagtcacggtcttggtaaggatctgcacaccagcttcctcgtttccccattcggggttcctgtggtctcttactagtctggtcgccctgttctccaggcttatactgtggtctctttcagaatatttcttccaatgtgctggaggagtctgtggtctctgaggacaccctgtcacctgacgaggatggggtgtgcgcaggccagtacttcaccgagagtggcctggtaggcctcctggagcaggccgcggagctcttcagcacggtcagtgcccagagggcatcccggggcctggcctcccatactccagctggacttggggtgctgggaacacctggtcttaatggcccagtcagccccacttcccgaggacacgtgccagggtgtgcggggcaggggatgggcccggggaggactttgatgtatgcaaattgcatgagcttcccaagggagctgagataacctttcatcacagtgccgatctgagcttcactgtatgctcattggttgggcagcagtttcacagtattatttctatttaataggggtggaactaagccacagagaggtgaaatggcctgcccagggttacacaataaatgatgaggcatgttttcactccctcgtttttcctctcagagagaaaaaaattagggaggaaccactgggaggagagaggaggaatacacagacagtgtcttccctcctagccactgtgcagtctgaaggaccatcacagaccaggaccagcttacagaaatgtgggcacagaaaccactgagactcctctggttaacgtaatctggatctaaacactcctagtatatatactagaaaaatatatagagagatgaagtcattgagattcagggcaaagaggaaacactcttgtctattttcttttctttttttgagacagagtctagctctgtcgcccaggctggaatgcagtggtgcaatcatggctcactgcagcctctacctccagggttcaagcaactctcctgcctcagcctcatgagtagctgggattacaggtgtgcaccaccacactcggccaattttttgtatttttagaggagacaggatttcaccctgttggccaggctggtctcaaactcctggcctcaagtgatctgcccatcttggcctcccaaagtgctggaactacaggtgtgagccaccacgcccaacttgttttcattttaataatctccctcctcctttacattttaagccaagaaagtattcagtactttactatatttagctgacccaattttgttttcatctatactatactcatccttattttccagtttttatttccaagtttcctctctacaattttatttattttaattattgttttaactgtcttctctctattcttgctttccttttcaagattcagaaaatgtctaatatactctcatttttcctcaaactcaacaaaatgaattagaatcctactaactctttggaggcatacatttagcatctggctagaggaggacctctgatgaaatttaaatatactaaaactgcctttctgaattgctgttagtccctgctaccaaacttctctcctgttttttcttttcgttttgttttgtttttgtttttgtttttgaggcagcgtcttgccttgtcacccaggctggagtgcagtgatgcagccttggctcactacagccttgacctcctgggctcagcctcccacctcaaccgcccaagtagctgaggctacaggagcatgctaccacacctggctgattttttaatttttttgcagagatggggtctccctatggtgtctaggatgatctgaacttctgggttcaagtgatcctcctgcctcagcctcccaaagtgctgggattacaggcatgagccactgcactcagccagtatttttttttcccccgaaagctcttctccttacttatcgccatacaggactacttagcgaggtgtctagttcagtttgaaggctaccactgtcccaaaagtgctcagataccccttcttgccctgtgaaatactgtgatacaacaataaattcactctccagcacattgtttggacaatgacctctggttgctcttcttaagtttccagtggattaaattctctctgatgctcttctcctctttccaagggaggcttatatgagacagttaatgaggtctacaagctggtcatccccatcctagaagcgcatcgagaattccggaagctgacactcactcacagcaagctgcagagagccttcgacagcatcgttaacaaggtagccggggagcctggctggcaggtcttgttacctggtggcaggcgaccctgtcctacagatgcttagccatccttcctctccagggagtgatttatctttagcacattgcttttgctctcacctgtcaaacagaaaagggctgaaattcttctaacagaggaccaaaattccatatgtgaaaacatacagcttaaattactttataaccaggaaatgtgagaaatttttaagtgtaattaaaagaagtcccagaaatctttcatgggattccttttgttgttatttctgaagtttattccataagcattaaatttttttaaggagtaatttctgtttacatcagccataggagtaaaatgctttgttaacacaatgagagacccctgccctttgcaactcagtggctcctcaggatgacataactaaggagagctttttatattttgttcctcaggatcataagagaatgtttggaacctacttccgagttggtttctttggatccaaatttggggatttggatgaacaggagtttgtctacaaagagcctgcaattaccaagcttcctgagatctcacatagactagaggtaagaaaagtgattctgtgcgcctgacctggtacactttacaaaaacaagttagagtgggtcatcaccaaaaataaacaaataaagagttatggattcatcattgatctctacataaagttttcccctttgcatttataaaaggcaaagtagaaaggtattaggtgagatcatgaggtgatgtaatattttgatagtttttccctaatactctgtgtatgcttttcacagtttggaattttatatggtgaatatttattttgaagtctgtgcaaaattcaatcaaggtcatgtgctttcttatcaccctttccaaatattagtagtttatactagtagatagagagtagtagagtttttcaacatgaagtttagcatcttgactttgaagtaatctagccaaatgactgaatcacccctagataatggtgaggccatcctttaggtatcactggatggcacctggggtccttctgatgtggagctactcagctgtggccagcccggctccaacctgccagtgagtgacatttggtccataatacaacagaaaagtgtagcatgttgttagaagcaaagctgaaagcatggagaaaaagagaaacagcctagagaaaggtcaggacaaaagaaacacaggttataagggccaaacactaagaactcagtcaaaggtgcctccccgatgggatttggatgaacaggaatttgtttacaaagagcctgcaattaccaagcaggactggggtcctttgaactgctcacaattaaccaaagattcactccttaggctttcattgctttgaatttgtgccctcctatgagtgtaaaacttaaaacatttgtgttgcctaatggcttcgtacactctccatccatgccaaaaaagacaagagggtttatccttacttgactcaaagaagccattgcccagggtggctgggtgagttgccccaaaattgtttagcacatgagaaaaagagctagcaattgaccccagtccacttggttccctatattgtttcccctacttagaattagaggtatatattttatcttcttgtgcactgtgatttgccacaatatgggaaggctggtgacttccaagttcccagggtacagaaggcgagaagtaaagagtgtgataccccaggagatacctcagcaaatataatgatgttagctgaattagaggccaagcatacatcttatagggaagcatataccagttgacagtgctatttttatttttgtcttaggaaatgctgaactttgctcattagctcagaggaactctcaataatcagtgaacatcattctaccttgcacttgctccaaacttatttcacttccaagaagacaaagagttgcattatgttaaaataacctttataaactgttggttcttcttacctaggcattttatggtcaatgttttggtgcagaatttgtggaagtgattaaagactccactcctgtggacaaaaccaagttggatcctaacaaggtatacaaaaatttacaaaaactaaccatcaagctctaaatcccttcgttctctacccaagaatacctaatgatctcatctatctggactctccaagtcacttaaatgcagtcaaaccttttcgtctagagttcaactactaattggtcagatcttaaagaaaatatagtcaaaggcaggaatcataataggagctaccacttattaagcaccaactgtgtacctggaactgcattaggccctctacatacatcattttatttcatcctgcaacgacccctggaagtagattttgtcattcctattttagagatgagaaaactgagacatggaagagtcaagcaagtttcaaggtcatgcaagcagcagagccagtactcagacttgaggtctgttgcttctgaacccctactcttcagcactgctctttactgcctttttataaaacctttaaactctccatttcaaactcgacaacacttagtggcttccttctttaggctgcaagtattccttccatccaagtccgggatcactgtgctgttgggggaatggtaaaaacggcttgggtttgggtttcctcactttcacaagagggtatgttccatttcaccccaaaatgggtgtacagttctgatgctaacacgtggaggtggtatcagctcccacagggtaaaggctcagtcctcctcaagactgccctgacttcagatgccagcttcaagagggacccccaggccagccacgcttctgatcagccagctacaaatttgggagtttctataacctgttagcttgaaaataggagaaaacaaagcaaataataataataataataataataataatttgggagtttctatgatacctgttagattaaataattcactacaatgactcacagaattccaaaaagtactctggttactatcagagtattatgataaagggtgaacatctttttgtgcctttatttatggcttcctggctcatcagtgtgttctccaaccaggaagctccgccaagtctcagtgtccagagattttgttggggtttcattatgtaggcaaattgaatacagtctccagcccctctcctgtctccagaggtcatccagttcctaccctgtaatcacagaattggtctttttggtggccacttggcatcctgaagctatccaggggcccagcatgagtcacctcattagcatcacaaagacacccatcactgaggaaattctaagtgtttctaaagctctgtgctaggaaatggagacaaagaccagacatattctttattataccacaagctgatgctgcccactcagcccaactcacatgtccatgaatgagctttctaagttactggaaatagtgcaagtgcaaggtatcattaagggccctgggacagaggaccattcaccatctagcaaacctataaaatgaaaggtccaaactcccagttccatcttccaggatatgaagaagataatggaagaggggaagaattggccaaattgaagagtttgtttttctacatttttcagaatgctttctcacttaagacacattccctagcctcggcttgaaagcagtggctgtggtaagagtttaactaatcttcagacacacatgtctgggagatggagttggccgtgtgcccacagtgatctgtacatagcacaagctgtgtaaaatgtgacctccctcagccaaggtgcccttttcccctcttttaaaattcccagggtaggttgtgagagtttggaatgagagtctgaacccagagttacaaccagatttcattatactaagtcgtgatttacagtctgaggtcagtgaccccactcatccctttcagtgggtgagtgtcccagcatctgaactcatggtcactttttttcctaagagattgtcgtctttaatgagtacttattcgctctgtgtttgagggtggaggtgatgtgagtgtgtgtttaaatgaggcctaggcagtaaaattcagttttggtgtttagttctatgagttttgacaaacacatgtgactaccttcataaccaagatatagaacagatccaccactccaaaatacttcccgtgcccattggtagtccatgttgcaatagttccttcctttccgttgctgagtagtattctgttgtgtgactacctcaccatttgcttgttaattccccactggagtgacatttgggttgtttctagtctttgttatgaataaagttgctggagacatttgtgtacaggtttttgtatggacataagctttcatttctctcctgtacacacataggagtggggttgctgggtccaatggtagtgcagtttaactgcataagagaccgccagcttcttctgcaaagtagctgtgcattttgcattcccaccctctgtgtatgacagctctagctgatctccatccttgccagcacttgatattgttagttttctttagttcggccattcatgcttcctcataactgtgaggtagtcattgtcattctgtaaaggaaagtttgtctctttggaatagcagtttgcaaactctcataccaaggcttccactgtggatcagtttgctctgctaggaaggtgcggccggtggccctcactctccccacaggcacattcccctctccctccttgcagccccttctgtccttgggggtggagaggaggaacttctgctggccacattctcccctgcatctgtagcttttctgcactgggcagggcggtgccggcacgccgtgttcctgcatgcccctccattgcgtcagggatggccgtttgcagaatagctcatcttctccctccgtgccttttcccccttaggcctacatacagatcacttttgtggagccctactttgatgagtatgagatgaaagacagggtcacatactttgagaagaatttcaacctccggaggttcatgtacaccaccccgttcaccctggaggggcggcctcggggagagctgcatgagcagtacagaaggaacacagtcctgaccactatgcacgccttcccctacatcaagaccaggatcagcgtcatccagaaggaggaggtaatgcacccaagggattggccaccactggatgagtgggctgggtggcctcccaggaggacccacaaacctctttcacagtggattggactgaaaacaaggagggatgcacttgaaatatgattatatggttgtcctttcactctcatagtgccagaaaatcccatttaggcagctacatattttatagcactattgtatattaaatatttaatattttaaagttatatctttagtataagtgtgtttatgtatttaattataatatttaatatatatttcaattataaacttgtacaacagatatatttaccttttaaatattttatataaaatttttctatatttcaaagcttagaggtgattcaagcatagtcgtgctgttaattattggagacgggacctgcacgtgggcagccccagtgaggcggtggtgtgctgtgggaaagggccgtgtaaggtagacaagttcactgactagcttctagtcctagcttcctcctgtgattttaaacaagctacgtaccttcagtttcttcatctatgcattagcaggaaagacctctaagtacagtacaagattatactcattttattaataaaaggactggtcaagaaggtctctcaaaccacagaattgttcaaaattctacacaccataaacaacttattattctttaaaacacatatatatacacttatttgtcgtcctttttatgcagggccacagacttctctgtgactgtgggtttgctgatcacaattcagcattttcttttataaaccacacccgtagtgctttgtccatgattttcagttttgctttgtgtaagcagagtgagagcttaaagatccttgttaaacaatttgagagcagaagccttctggatgtttatgatgtttttctccccgagactttgacagcagtcttgtgcacacctaatatgacaggaatttttatagcaactcactttcataatatcttgtccaaccatttggcttggttttcatagaaagaaatctttttctttccacacccatggttcatcagtttctccattatctaattagattgggtcattaaaataacaagtataacaggcataatcaagttggtgaacaaacacagatgaattgtggtgaatatatacctcatcaggcagaagcagaaatagctgagctaactggagagtcatccagcaggtagtgttcagctgggtaaccacatcagggtgtggctttcacagaagctgaagaaagcctgaagcagtgactcagtcgggaggaggtgggtttagaagccatctgctgtacttcctatacttcttggtttggacttttgaacactgagacattctaggcataacacagatataaactcatggtgcccaaaagcatttcaaaaccttttcttttcttcattcctgccttcctttcctttccttcctttcctttcgttcttcctttttttctgtgtctctgtctctctttctctctttttcatttttgagacaggatcttcctctgttgccctagagtgcagtggcatgaacatggctcactgcagcctcgacctcctgggctcgagcaattttcctacctcagcctcctgtgtagctgggactacaggcttgtgccaccatgcccagctaattaaaaatacagagagatatatattttgtaagagacaggggtcttactttgttgcccagtctggtctcaaactgttggcctcaaacgatcctcctacctcagcctcccaaggtgctgggattacaagtgtgagccactgcaccagcctgaagttttcttggccttccttcgttccccaacaacctcaacaacagttctcagctgtttgctagggctgtagaacaaagttccatagactgggtggcttaaacaactgaaatttactgtctgcacaattctagaggctagaagtttgaaatcaaggtgccagcactgttggtgccttctgagggctgtgaggaaagggtctgttccaggcctctctccctgacctgtggacagccctcttctccctgtgtctcttcacatcatcttccctctgtgttcgtgtccagatttcctcttctcgtaaggacaccagtcatattggactagggcttaccctgctggcctcattttaacttgattgcctctgtaaagaccctatctccaaagaaggtcacattctgaggtactgaaggttaggacttcgacatatacattttgggggaacacaattcaacctataaaattcagaaaagactctaccccaaaccagcagaacttagcaaatagattgattgacccttaaaagaattccatttactggaaattcaccctcagttggagaaggcacaggtgatatcaaaagcctgtgttatgatgggggagaaaatcttgagtgctgtgcttctactacagctttctgcattgtaagttgagtaacatgaggctgtgtgcggtggctcttgcctgtaatcccagcactttgggaggccgaggcagggggattgcctaaggttgggagtttgagaccagcctggccaacatagagaaaccgcatctctactaaaaatacaaaattatctgggtgtggtggtgcatgcctgtaatcccagctacttgggaggctgaggcaggagaattgcttgaacccgggaggcggagattgcagtgagccaagatcatgccattgcactccagcctagacaacaagagcaaaactccatctcaaataaataaataaataaataagtaagttgagtaacttgctcagtaataggaaaaggcacctgacagggtagaaaaaacatggactttgaagatagacatacttgtgatcgaattatgacctcctcccttactacctgtggcattctgtggaacttaaccttacaaatccccctttgactgtaaaatggagagtataaagaggttgttgagaggaataaatgctaaatgtatgtaaagttcctggaacataaggaatcaagaaatgttaggcccatctttctttttaacctgttaagagtattttaaattactctgaaagtctttccctagctgcctcttcaaattcaggtggcctctctgtcatagctccaggcttgtccatagcttatgagaccagacagtgacttccctatgtttacgtctcatgttcagtttgttttgacaccgattgaagttgccattgaagacatgaagaagaagaccctgcagttagcagttgccattaaccaggagccgcctgatgcaaagatgcttcagatggtgctgcaaggctctgtgggagctactgtaaatcaggtaagcaaaaccagaggtggcagctcctctggttcttattatttaggttgtcattatacgtctgcacccttcttccttggggttgatgaggactttgatccatagacaaacacagaaatgttcctacacttaacctgaacacctgtaaggtttagaagacttttaggaaacctcttccctttcatgtaacaaccccaggtaaaaaagaaatcctagagatgagtggaccaggctttaaggagtaccactttctcagaggagtctccacttcggggccagacctgacaatatgatgcaaatctggagtcatgttgaagaatgcttagtcatgaccaattcacgcagagtaattgcagggcttgagactcacctacaaatgcctataggagagaaggaaaaggatctagaacatccaactcttggctcagtcagcagatgaacccagcatgccaaggaccttgacaaccaggaatgacctgggacctgacttcttaggctacttcagacaagactagatcttcctatcagacttcttagaacgctgactcccaagttcagcatggtgctcaagcagtctcagatgaagggaggtaccagcctaatacctctgtccagtgggcctccttaattcaaatctagatctgttcttgtccacacttccacggcagttattcagtgagcatcatgagtcttttctcattcagcgtaattggatttccccacaaaagttctgagtgtacttgacatcaagggagcagaaacagagaagagaaatgcctattacattcccaagatcaggaaaaaaaaatgaggaaacgtttgcctttgtaagtgccaatcctttgataaaatggaagactttccaagcccacaaccatggtctatctgtacacgatggatatctctgactcaatccagcagttatgcaaaatgatgtttgccatgaaggcaactagataagtgaacaaaaatgaatagatcaaggcaatcctgatttttagaaaagcaactcaaagcacataccatttgatgtagttgtattacacttatatatgaatgaaaatctattattagtagtatttgattgataaaataatattcggcgccaggctcagtggctcatgcctataatcccagcactgtgggaggccgaggtgggtgaatcacttgaggtcaggagtttcagaccagcctggccaacatggtgaaaccccatctctgctaaaaatacaaaaattagccagtgtggtggcaggcgcttgtagtcccagtacttgggaggctgaggcaggagaatcccttgaacccgggaggtggaggttgtagtgagctgagattatgccactgcgctccagcctgagtgacagagtaagactctgtctcaaaaacaacaataaaaaagaaaataaatttgggctgtgtatggtgcgcacgcctgtaatcccagcaatttgggaggctgaggtgggtggatcccttgaggccaggagttcaagaccagcctgggcaatgtggcaaaatcccatcactacaaaaaaatacaaaaatagccaggtatagtggcacacacctgtagtctcagctacttgggaggctgacatgggaggatcacttgagcctgggaagtggaggctgcagtgagcagagatcatgccactgctctctagcctgggtgatagagcgagaccctgtctaaaaaacaaaaacaaaacacacacacacagggaaaatacatttatacttctgagtgttcctctaaaacttcagattcctcctaagaaatcaaaatttcctgagatgtccaagaccttccttatttttttttgtttatttcaaaccaactacaaaattaaatgttcaaactaagaagtcactccaatattttctcccaagcaatttaatttccttcatatatgtatgaatatattcatatatatgtgtgtgtatatatatatacatatatatgcatatacatatacatatgcatatacatatatatgtatgtgtatatatatatgtgtgtgtgtgtatatatatatatatatatatatttttttttttttttttttttttttcccaccagggaccactggaagtagcccaagtgtttttggctgaaattcctgctgatccaaaactctatcgacatcacaacaagttgaggttatgctttaaggaattcatcatgaggtaagaaggaaaatggctgggaatttcagtagagcagtggttctcaaagtgcaatcttagaccagcagcttcagcatcacctgagaacttgctagaaagacaaagtctcaggcaccctccagacctgctgaattggaatctctggaggtgtggctcagcaatgtgcagtttaacccgccctccaggtgatcctgatgcacactgaagtttgaggaccactgcagcagagcaacactacttgaactactaatgagtaactaacacgtcaactatgaaacgcttttgtggctagcatcccgtgtgcctcacaatcacttgttgtaaaacaagtatcatcatcttcctcattttacaaaagaggaatcagaggttcagagagaggagataattttacttaaggtcacacagacagttggcagcagagatgagctcaaaccaggtcttctgaatccaaatagtccacatgtccatcaatgtgctgatattccactgatgcactagagtcccagaggttctttgcattggcagtcattgtaatgttacaaatcttataatatcttatttttagaaacttaaaaacatacactgcctcaaattgagagaggcaagttctaaaaccaggcttttcaaaggtattatcctgtgacagttccccatgtcagacaagtctcatctctgttccttaattctgcagtggagctggcttcaagagcagtcagttaggaactgggtctttggtcaaagccttgtaatttattgcaatacagacagatatattgggtctcctatggtcctaaaaatatgagtatgaaggatgtgatggcatttcacctataagagaaaaggacttcagaaaaatgtgtagcaatatttctttctattcaaaaccttagagaagaatattaagtataagaatatcttcacttggcagatggggataaaggagactaaaagtttgctaaattcagtgaaaactcatcaaaatgctagcatttgtgaggttagagatatctcctccttcacaggcttttgcgagaggtccgcaattttgctgcatatacaggagacacactgtgccctgcagtgaatcacagccgcttggtaataggatgtttgtgtggctttgcgtgtttgtatttgtgcatgtgtgtgaacatactcacagattatcttgattaatgttttgatatttgaattgtttcctgtatttgacaacaattctgacagaaaaactagttgttgttgttgttttttcagtacataatacgtatcttttaaaaggctagaaaaatatttggggaattattttattattttattttattttgagacaaggtctcactctgttgcccaggctggagtacagtggcataatctcagctcactgcaacctccacttcccaggctcaagagattctcctccctgagcctcccaagtagctgggactacagacgtgtgccaccacatctggctaatttttgtatttttggtagaaatggggtttcaccatgttggccaggctgatcttgaactcctgacctcaaatgatccacctgccttggtctcccaaagtgctgggattacaggcatataccaccgtgcccggccctattttttattttttgtggagacagggtctcactatgccgtctaggctggtcttgaattcctgggctcagagattgggggcttaaaaaaattttttttcatatatttttatttaaaattcattatggttgaatgcttccaaagttgactatgccccaggacctctaaaaggacctatgaaatgtttgaagagcactcactatattccaggcatgatattagttatgggactacagagatctggcttgttcctctgttcttaatgacaggacatagccctgcatggctgaataatagaatgcagcatatgcacagaactttaagaatgactaactacaggactataaagatcagaaaagagaaatcagtttcaggctggagcatttgtgggaggcgttatggaaaaacaccacttaaatcttgtcttgactatatacgtggaagaaaggcgctagtggggaagagggagccaggacagtggccctgcctgatccaaggtatcactttcagctgctttagttacccatggtttgaaagtattacttacaatatgatattcagagagagagagagagaccacattcacataacttttatttcagtatattgctgtaattgttgttaatctcttactctatctaatttgtaaattaagctttatcataggtatgtatgtataggaaaaaaacataatatatgtagggttcggtaccatccgcagtttcaggcatcccctgggggtcttggaacctatccccgagaatgaggaggactgagtaccactgagtggaccagcaggaccacgagactctgtcaggaatgcctgtgatgcaccgggttcctctaagtccagctggagcagcgtgttctcatgagcatgctaggacaaggaggaaagattggaaatatgataatatcagtaaatgaggctctgaatacaatttaaatgtttaagaaaacttgtcaggagagtgattttcatttacttcagtttgcctcaattttttctactagttataaatcttgcaatccagtatctcacgggtatgatcctttccatgacaccacctaggtaaaatgtacttacaaaatccctactaaacatgcgtttctcattagctcccagccccaggaaaagttactccaaaaagaaccagtgcccagtaaaactagtcccaggcaagagatacaagaggaaatggactttcctaggggtcgctcctttaacaaagtcattagagtttcaataatgaggctatcattctccccagatggcctacagaaatgttggattttcaaaatcaaattcaccattttaaagttgttctcctacccttttaatggtgattccacatgggaaccagtcccacctttctccccactggctgggctgctgcattgttctaggaggccaggagactgtccatgcttcccagacttcactgttcttacacgtcacctgaggatttgtcaaaatgcagattttggcctgatgcagtggctccgcctctaatcccagcactttgggaggctgaggtggaaggactgcttgagcccaggagttcaggaccagcctgggcaacatggcgaaactctgtctctttaaaaaaatacaaaaaaatacaaaaatttagccaagcgtggtagtggtgtgtgcctgtagtcccagctactcgagaggctgaggtgcgaggatagcttgagcccgaggaggtcaaggctgcaatgagccatgatcgtgccactgcactccagcctgggtgacagagaaagaccctgtctcaaaaaaagaaaaagaaaaatgcagattctgattcagtaggtctggggttggtcctgaagcactgcatttctaacaggcccccaggtgatgctgctgctgctacactggaccaaactttgagtggagagcctgcaaagattgcttaatttcctccctttcacatttctccctattacctctccctccttccctgagggcttaatctcttaggccatccttatcatcatttaccacttttgccgtctgcttcctcccaaaaaataaataaataaataaataataaaataaaattttaatggcaaaaaaagaagttgtaaatctcaataaaattatgtgagaacaaaaaaaaaagcaaacatgctcaaactgctgcaccttgaaccaactatagacgtcagttcatccattcattcagcagttattgagctcctactttgtgccaggcactgtgctacatatgtggaaggatgaagtcccaatatcagtaggacaaggctacagacaaaacagtactgctgctcattattcatctctatgtgcaaacacaacagatggcctgccctccacttcattctacagagatcagaagtcgtgggtgagagtgtgctgatggtgcacaactgtgtaaattactaaaactcatcaaactctaaacataaaatgggtgaatgttacggtatgtaaatcataccctgaatacagatagtagatgaggttcctctgttgcttaattgcttctcaagtccaatctggaagttacagcttttaatgaatagagtaactattttttcacgttgtttgtgctgtgtattttctcctccactctgctaacagacagcagaggtgacgcagaagtggaaaatatttggggcttgaacagctctcaggtttcccctttagtaagctccagcttctcagcagacttgggctgtagatcgataagcccagatttccaaggtgaccataaatgagtctctgttgctgagagctaatagcggaaacatttgcttgccaggtccactgcgtctagtgccaccacggggcagcgacctttctgactcagctgtagtggaagcagaaacagccataaagaatcctggcagcctgatttgctgcagccagtactcatccagccagtcctgcaactcttcaaactgttaccaagctgggacctcaatcagcttctgtcttttcctgcaataataaaaaacatctcgggttcagaagccaagacaagaagatagagagatacaatcttctatcttcctcttctgctcccccaaacaccccgaccatttagatttttaaattttcttctttatacttatctggactttctcattcttataaagactaagtgatgttaaatttgtttttaatttaaataaaagatagtagtactcactggcaccagttacagcttgcctttaagagaagtagtttcagatacaccctgaaagggttctgcagcatatatgtggtcataggctcagaaaacaggctgttgagtggtggcgtttttaaactggagttggggtctatgaagaggaaggagaaggaatttgtccgagtagccaaaggacaaccaaatgtgtagagtgtaggtggaaaaagaagcagtagttttaacttgagaccaaggccatatgcctggcttatagctggaaatggggaaatggctttcctaggcagtatatgtggcgttggggttgggaatatgggcactcaagccagattgcctgagttcagatcccattctgcctcaactagatgtgtgaccctgagaagttacctaccctcggtttccccagatgtaaaatcggaataataattgtacctctcccttgcagttagtgacagaataaaatgagttaatacatggaacttagaataagacttcatacatactaagggatcagtaagtgtaacattgttcagtggggcaaataggggactgatggatttgagtgggaaatagagaattaatctgacttaaatacggagattgtctatccatgatttgtctgtctctataaagtttgaatcataagacacagtgatgctgatgagacattggcctgggagcagcaggattctgggtttatatccagctgtgctgtcccacaggtatgtgactggacagggcacttcacctctttgcatgttagtttcatcaactatgaaataaagagactagaatacagcatctctaatagtttatcattctcatattgtacaaatagttcatttacttagcctgggtctgtcaggcataataacgctaccatgtgctctggcttcagctgtgtgcagggactcttctgaacatttgatatgtttcaactaatttaatctttacattaatttatgaggtaggctcttatcacccacacatcacagatgaagaaactatgacatgaagaggttaagtagcttgtttaaggttgcaaagccagtaagcagcaaagcgggattcagagttgagcactctggctccagagtccatcctcttaattgccatgctgagctgttccctctagtgactatattcagttgctagtaacagaaggaagagtagcttaaataagaaatttatttttctctcacattaaataagattggaggtagtcgatgtagagctgtgtagtggcctcataaagtcatcagagaccctggttcttttccaatcctttgccatgccatcctggttctagtgtacccattctcgtggtcatgatatggttgctagggctccagccatcatgaccacatctaggcaagtcaggagtagaaatgaggaaacagcaaaaagatgtgcccatttcccagtgccttcacctatattatcagcgatccctacctgcatgggaggctaggaagtgtaagttttcaggtggtcacactgcctggagttctgccagtagggaagaaagaatggatattgagaaaacaactaacgaatgtttgtctgccacactgaggaacccatgtatgggctgtgctgaaaaaggggggccaaggctgggtacagtggctacgcctgtaatcccagtactttgggaggctgaggtgggcggatcacttgagctcacaagttcgagaccagcctgggcaacatggcaaaacctcgtctttacaaaaaatacaaaaaaaattaaccgggtgtagtggcgtgcctgtagttccaactgctcgggaagctgaggtgggaggatcacttgagcccaggaggcagaggttgcagtgagctgagatcatgccactgccttccaccctgcatgacagaatgagatcctctctctaaaaatagagggggtaccaagagatgcagggggggtgagggcagcatgactactctctctgtaggagaccttaactctataaatggaggccccaaaatgttactgccatcaaaagccaggaatccttttctggaggcgtaacttcctgccctttctaatccctatcaatctggtttctgtagaactgtgactgctagaaaaccccaggcatatttgttctaagaaaatacttgtgttcggtgaatttaccaacaaagggagcatcagaggatgtgagggaagtctggaatggttgtatcactaagtgagagcagcacagatgtttgtggacctattgagaatgttacagataagaccatttttgaaaagttgtttgcagtgtcattttatgatcttgtgtacattttccaagcgatgtggctattctctaggagggatagtagaaattatttcaattttaatcaaataacctagagaatataacccaaatgactgaaaggaagaaatgtagaaaaagtatataaaataattttttgcattataaaagtttaaagacataaagtaatattactacataaaatctaagttttttactccagctattaatatgtttttctttataaaacatcacatttattaattgctgtgtaacaaactacctcacaatttagtggcttaaaagaaaatttaattattatgcatgtggtacataataatttttgctttcctcatttctactcctgatacttgcctatgatgtggtcatgatggctggggccctagcgaggtgtattgtggccatgagaatggttttgctgcaacttggggttggctgggctcagctaagcagtttttgcctggagtctctcagttgcactgagacagtgactaggacttgaattacctgaatgcttcctcactcatgtctggtgtctgggctgagaatactcaaacagcaggggctcctcctctctctaactctccttctctccacatggtctctcctgcatgacagctttagggtaactagacttgtcacaggatggttcagaactcttatagtacagaacgagagagagacagaggccatattaccttttattagccagtcacacagtaccacctccaccacatcctattcagtgtggctgtcacaaagaaccatccacctcttgatgggggcatgggcaaggttctaggagagcacattcttgtggccattttcagaaatacaatctgctacactccagaagcatctgtttgccttattatcatagcttctgatttaattctcccagcaaccctaggagattatatgagcttattatccccattttccagagaaaattgaagatttttatggttaagtcatcctgctaatgagtagcagcttgtttcaaccgcagttgtctgcatataacacatttaactcagtcaagggcacatggtgagcaatcagaaggtgttagctagctgctgctacttctgcaaacaaagactaaggagagtttagctgattttaccaaagttgtccgagtagacttccccaaattagctgttagctttggcaggactcatcccacctcctgtagcctgccaatgttataaacttgggccttgaagtcatcctgaaactgatcttattttacacatggtggtaattgtaactgttagttaagaagcaataaaaaaataataaggggtgatatagatttctcaggattcaaaggccatatgccttcccttctatttcttccctaaaaccgttaattcataaccttagctatcctataatttgcttcaattaatgacaaacataaaagataggtgaaaatccagttaagggagttctttcagattctgtgtgagttaaatcaagtccttcttctatagcaggctaattccatgatgaagctgtggtgctaagtttatttttgcctaggcaggtagctcttccttgccacatgctatcctcttcctctttgactgtcatcctgaaaatgtgttcagtgttaagaggatttgataacaatgtctgggtatctccataacttagtccaaatctggtaccactgttaggaaaataatgtaagccatattgatcacccacgtcttattcatttgaaggataatatagttattactaattattgcgtgttaggtaacatacagccattattctgtccctttaaggtttattgatttgtaagttcccttgggtagaagagtacaaaacaaaaggcaaaacttcatcatgtttaaataacgtgattttcttctttggtgtgtaccgtaccgtgcaggagacagggaaaacaccaggtttaacggtccacaagccagataaccatgatgagttctaaagattttctctgtctttaatgttcttcagttttgtcatgagaagactggatatagctctgttgttgttcattagaggatttatatctctcttcaactctagaaaattaccagctgttatctctttaaatattgtctccctctcattttccattcccttggagattctattagatgtgggttggatcttccttatatctctatgtttcttaaccaattttttcatatttttttattttttaaatctcattggtgatttccttggatctgtcatacatttacttctccaattatgtctagtctattatttaacctttaacctttccattgagttttttgtcttttagcaactgcatttttttttttttttttttttttttttttggtgagacaaggtctggttctgtcacccaggctggagtgcagtggcatgatcttggctcactgcaacctccacctcccaggctcaagccatcttcccacctcagcttcccaaatagctgggactgcagtcacctgccaccatacccagctaatttttatattttttgtagagatggggttttgccatgttgcccagtctagtctttaacttgtgagctcaggcaatccacccaccttagcttcccaaagtgctgggattacaggcatgaggcaccacacccagcctagtgactgcatttttcttttttctagaagttctgtttggtccttttctgaacttttcctggtctcttttttcattttccctgtttatttgtttttatcatggattttataccttttatttattttctttttttttttctagttacatgattacttaggattttatacattttattacctctctatattaactttggttttttacattgttttattatctctaattcttattggactaattcttttgtttgatgcatctgttagttttccctcgtggtggttggtttcttcatatggtttgtaattttttattgtgagctcatctttggcgagagtggctcatatgccctgattgagaatgtgttcctccagaacaactttatgttggtttggctgaatcctagcaatttcagtaatcttggactggcttttaagttattttctcaccttgaagcacatacagtcaaggaatgtacatttgtaacttatactatgtgtggtgcaagcctagaatttccatttctcaatatgactttcttttccataaatggccctaagctgatagcaagttttcattctgcctctctggacatcttgcagcatttttctaaaccctctttcatagatgggatagcttttcaaggctctggacgatatgcaggtggcatatccagaatctccctttgccctggccaaggccacatcactaatcttgtgtgagctttgaagccccttcccctcagcccatagacctatacacagtcctaaaatcttaatgggcagtcctactgacagctgccttgtcaccagctcctgtgatcattctagctttgatttttctctttctttctggcacctggtgttcccctttctctttcaacaagtttttgctgtgctttcctagcacttccatatgtacgtagcaggaggaggctgaatgccatctgctctgtctgccatgttgctgtaaatcacagtgagttttttgtaagtgtaacagcttccattctgcagtgtgttttgagtctgactcttagatccatcacttcctcacagtgttatcttgggcaagcatcctaacatttctgagtttcagaaacaaaatagagataaatgctgactttttagggttgttgggaaaattaaacagataatgcatgtaaaacttcttgaaacttcttctggcacatagcaagtcagaggttctcaattctggctaggttggcttcagtatcccctgggcaactttttaacattagacatttctgggccagaagcaatggcccacacttgtagtcccagctacccaggaggctgaggtaggaggatcactggggcccaggaggtcgaagtttgccatgagctgtgatcatgccactgcactccagcctgggtgatagagtgagccccgtctcaaaaaataataaaataaggtaaaaaaaaaaaacaaacacagagatttctgggtgctacccctcagcagttatgattcattaagtctgagatagatcccagaaatctgcattttgaaaagctccacaggtgatcccgatatgccacccagtttgaaaacgttcttaaagttattcgaaaaatcgtaagtaatttcattgttctcagatttctaagcacttcaaagtcatttatttctcccacactgatattttcatctcagatgtggtgaagctgtagagaaaaacaagcgtctcatcacggcagaccagagggaatatcagcaggaactcaaaaagaactataacaagctaaaagagaacctcaggccaatgatcgagcggaaaattccagaactgtacaagccaatattcagagttgagagtcaaaagaggtaagaacagggcagaggaggcctcttcctgtgggataaagagcagcgcatggggcctagcaccttggggcatgctctgctgcacttggggagctgcagaacctcgaaagggtggaagagggtcccacagtcagagaggctaccagagtgtgattcattctgcctctgtcctccccatccctgctccttgacctctcccagacaccttggtgttggtcttgtgccagggtattcccagggctgaatgatggcctgtgttggtttttttgtttgtttggttggtttgtatgtttgttttggcacagtgtgaaggggtcgcagacctttcacttattatttgctgagttgtccatgactgatgtccatttctactgggtgatccacccccaaccctttctaaaaggctaactgatcttttcttgcttctgtacgctctctttccctctcctccctctcttttcttaatttcagggactccttccacagatctagtttcaggaaatgtgaaacccagttgtcacagggcagctaagaaaagccatcttcattcgtggagactgtggccctgcaaccctggagaaggacttgctggtacttaaaaaatgggacatttgccacccaggactgactgtacactccctgatcagccagcactctggaagctttgggatcccaggaaccatggaattattcccaaatggactctgaccagatttttgccatactggggggtggcgggatggaggatgggtactcaggcatgactgcgtatttattaaagtgtgtttttccacaatgtaccaaacaaggcataagcagcttctcctgctgactggccaatcactgcccatctgagagatgatttcctctggcccatatttgaatttattggagtaactcaaattgcctgaggaaaaatggaaaaattatccaccagtcgattcaaactgaatttcactctttataggaaggcagggcaaacttgtaggagtacgaaacattttcaataaatctacaaagggaagccttactacaattccaaaaatcatcatggttggaaatttgggaggagattatttgtgaacttgttacccttttggtaatggtggactaattgctgtatagttatttttgttttattattactgttacattaatttaacatgcatttatagaagaatacattcaaagcactgatgtaggagatacacggtacttggagcagtcagccagaaatcacagatactgctttcacttaaatggaaacaattctccgataatgctttgctttttttcttatgtcactcttgtgtactatctatttttctcctctctgggaccaagtttctttttataaagcaataatatctctgttttcatttcagaacattgtgctgtctgtcagcatatgtatatcagctacaaaatatattcaactttgacttcttttgacaaaggactttaggaaaaagaggaacaaagacattatttgagaattaaattatatatttttaatatgactgtgaccttgactgataataaagatgtaataagaattgcaagctaaa

SEQ ID NO: 15554 - DNA, 38871 bp, Homo sapiens
gagtattgtcacatatcagcccagaaagtcacagggtacagcaactcatacttgctcccagcaccaggccagccccattctgcctccagggagtcacccaaaatagagagatgagggtaaaataagacctaggaatactatttatttgcctccatggcctttgaacttgcacatccaacgtaacggctcctgtgtgttcttgattgttccaattatcatttttcctctcgaatacctgagagcattcattattttgcaagagatttgagaatccctgtgccctaacttttctttccttgatgtgggatgttcttctgtgactaggtaagtttatctcaatgtgtccccaaataatttctcagaatgttaaattcataaaagctaccatgaaaggataaataaatgaaaggagttctgaggtcaaaacatttggggaaagaagagtctttctccttctgaggcattctcagtgcacagtaacctgtttatctcgctttgccttgctctttcccaagcacatttttgctcaacgccccctaccttccccatacacttgttaacactttgcagagcactagggctctgtgggacaggctgggaaatgcaggttgacatgccactgttaatacctagaaaattaaggcaaacttgtccctgagagatgtcaggatagcacagtatggaaaggccatgcttatcagggctcttatctgagagaatacagtggttatgagcatgactctggaactagacagtctgggttgaattccccgctctgccatttagttatatgatatggggtgtattacctaacatctctgtatctcatttgttcctcacttgtgacatggggatgatgacaatgataatagtaccaacctataggatagctatgagaattaaacaaattagtaaatatgaagtatttggaacattggcctgactcaggataagtcctgtttaaatgttagtatcattattattgtttcttcaagccaggaatatacttcatcaattatgtgtacactcattccttcattcaacaaacacttacttaatactcctgtgtcctaggcactgttctagtgctggagatacatcagtgaatcaaaaacatgagagaaaaatccctgtccttgtggaacttacactgtagtggaatctactactaataatgcaaatagaaagaaaaatatatgcaagttacccaggcactgggtagcctagtacctgtcctatagttgtcaaatggatggatatattattcttattgttgttgtcgtttacagtaattgagcttggaggtttgagctgccatcttagataagaacagaaagctaagccaatacgagtgccatgccagtaagaaaaggaaactattacataaagattaggaagaaaaaagagaagaatgacaagtaggccattatctatggccatgagttttatttaaaatgagctggaccttttttgccttctttatctgtgtatcagatagacaattacctctaggcagatttccacattccaagacatgaagactttctaagctgcagcagacacatctttacttgtagcaaaacagagagcgatgggggttattttcagatgactgtagctgaagaggaagaatcaagtaattcactccccccaataataattcacttctgagaggaaaaacttctttggaaaaagcaccccatgaatggaagtctcagcatttgctgaagaacttagttaaaataaactctagacctttttcattgattctttatctcttcttttccagaaaccttctctatgtctacccacagaggctgaactttgtaaacaaactagcatcagcccggaacattacaataaagatccagtttatgtgtggagaagatgctagcaatgcgatgccggtaaggagggaaacgaacatttgcctcaaatcagggtgggctgctcacccctgtcacttcacacaagtccgggactcatcagtgtacaaagtccgtctattccaggccaatactgctcagcatgtgcaagggcttctgtgcccaggatatcagtggggaaacagggtcagtcttacttgacgatctctttctcggcttattctgtagtgagcttggaacatacagatcattttagaggattaaaaaaagtcataaagtctttccatactgcccataggaccaccccactctaaaggcatacaaagtaaagagatggctcaacacgtgcgccatgtttgctgagtgtcttccatgcacaaactgtacacactgtgttatacacacacagtgttacacacttactcaagcctcggaccacagtgctgatgaatacaaagtaccgcctagtaattataaacacacaccacctccacaccttctaggagtggatctttgttctgaggcaaaatataaatcaaattattcatatatatatatatatataaaatgcagtgtgctccaaggaactcaaaatgccagaatttatactttttaaaccatctcctactaaatgagatggtggttagctattactatttcccataagtcatagaattcagttaatataactttctttctttttttcttttttttttttttttttgagacagagtttcactctttttgcccaggctggagtacaatggccgcaacctccacctcccaagttcaagtgattctcctgcctcagccttccaagtagctgggattacaggcgcgtgccaccacgcccagctaattttgtatttttagtagagatggggtttcaccatgttggccagggtggtctcaaactcctgacctcagctgatccacccgccttggcctcctaaagtgctgggactaaaggcgtgagccactgcacgcagttaatatacctttctaaaaagaaaaagaaaaaaatcctttctcttaatgtcccacccaaagaaaaaaagaaaaaaaaaaacctttctcctaacgtcccacctgtcttcccaatgcaaggtgtcttaagacagcggtggggtcctcttagtcctctctgctcaggcccctggcatgccactgccaggagtgccagatatgcttgtgcagatcctgtggcaaccaagatgcccagccaagagtgactgtgggctaaagtccagtctgttcttcattcactgagccatgggttctggtgttgggattactgcatctagaggaaagagctttttttctctgcacaaaggtgagtgcacttgttcataatgcatcctaaatgctgcttcaggcccaaggaggtatctttttctaaatggcacaaatgtggataaggcagtggagattcaaatcacctaagtgagtaggtctgtatgtttgagagagaagaacctggaactggggatttctcactcaagacaaaagtatgtaactttggcctgttggatagacctctaggcagtgaggcagagtggagagagtactggttttctaatctcacaaacatgtggcctttggtcactaatatagccccttggaacctcatttcacccttcatagccagttcctttgcactggtgtgcttgggccagttgtagtcccagcacttttttttttctttttgagacaggatctcactcttgcccaggctggggtgcaatggtgcaatctcgactcactgcaacctctgcttcctaggctcaagcgatcctcttgcctccgccccctgagtagcagggactatacgcatgtgccaccacgcctggctaatttttgtatttttttgtagagatgaggtttcgccatgttgcccaggctggtctccaactcctgggctcaagccattctcccacgccgacctcccagagtgctgagattacaggtgtgagccactgctcctggccaacccagcactcttaattgtacaaaatgcagctctatgagaccagaacatcctgttggcctgatgatagtcaatttgatgtacccaaatgttactgataatttgatcctttctctactggtgaacaggtcatctttggaaaatccagcgggcctgaatttctgcaggaagtgtacacagctgttacataccataataagtaagtctatttcagcattctaaatatatgccaagatggtttcatcatctcctggtttttccaagtcccgtgggtggttcctcctaactatttttataattcagggactgaggggcaaaggaaatccatgccagttccgtgactctgtgttgaagatgtataactttgccattaaccaagactgagagaagaacgtgtcttcaagaatccaatatagttttgacttttccagaagcttctattctagtatgatgcaaagaggttgtattacgttaattaaggaaacacatttcctaacttgctttgagaccctggaggggaccagaagcacagtccggctccccttgccctgtgtgtccctgtccgctccacttgacacctgccccactgtctgcctaggctgaccaaaggagaaatggaacactcattattccaccggcaaatggagtcatgggataatgcccaccctattattcatgttccacagggaagggagagacacctgcacagtgttggacggaattgggtttgatccgggcctgataacctgggcctaattaagtccttcatttaagcacattctgggattgggatgaggattaagtgaggtaatgtacattacatacctacattactttacaatgtacgtaatgtacttcgtaattaatgaagaacctagggcttcataatgcagttaaattggttcctttttcctcctgcctcattcatttgcttctactctttgatgagtgcagctaggtgctaggcttggttccttgggtagaaatggaaaaaggaggtcacagcaggagtccaaacctcatcctttcttcaaattaagttgttggagttttccattgtgtgggggagttgttttttgttttttgttttttgttttttgtttttcctgacaaagcctttagttcatgaacagttttatgtaagggaagtgcatctaataacataagcttggtctcagggacttccagcttcagagcagagtaatgtaaaatgaaaagcaaaacaccaggcaaattctgaggagcaaaggggctgtggcgttttacaatcagagaagtcatcattcttgctaaaagttatttgtgtataatgtgcttttgaaacaggtctcctgacttttatgaagaagtgaaaattaagctccccgctaagctcacagtaaatcaccacctcctgttcaccttctaccatatcagctgtcagcagaagcaaggagcctccgtggaaactctcctgggatattcagtgagttgtttccagcctgctgactcacactgcagttgttggtgcatctgaggtccctgcagagataaacaaccaaattctattcacttgattttttccagtcagaagtagcaaaacatgctaagccacattatagcaagaggcagaaatgatttgccttagcaaatgtcaaatttcaggaatggaaagctagcgggtgatagatgttggaagaatactcatctgttttttaaaaagcattgcagtgttcactatttccaaatttaatatccatgcttcacgtatagaactagctttgtcccccaagaagaaaccattttttctttaaaagatataaaaggtgaaataaacattgatgttgttcagacacacacaaacattggctacagagaaaaatgctactgctttagctccaaaagcaataaatcatcaatattaccatttcaggaggtctcggagatttaaaatgcaaagaactggacagaaattactgccaaaaagagtactggtcaatatctactcactgtttagttgcatttgattattgcgagctagataaattatcagaattatatgctgtaataaataccactttattatttacatcatctgtttcagtggctgccaattctcttaaatgaacgtcttcaaactggatcctactgtctcccagttgccttggaaaaattgccacccaactactccatgcattctgctgaggtaattggcaagctggccatcagctgtttcttgtccagctgtagtcttggaccaccttcccagactcactttccattcccatgtggccatggatgttcatcatgttctcagagagcacattgttctgataggatgggaggaataactgactgtgaaacctcattcttttaaatgccaccaaatcagaatgttcagtagacgcaacctacacccaaggcagcataaccttgcattatctaccacagagggattcccagaataatgtattatagaagaggaggcaaactaaggccattcatagtaaacaactgttcccatcaaggatccttataaaagattcccaggccagattcatccgtttctttcttgggtcagttgtcacagccctccggtagataccaaggtatttattctcctaccaatcccaatgccaatagcctttcccacttcctgtttctggcactttctcttgctcatccactctgctgcagtgcacccatttaaagagaagcccaggtggatcaactgaggtcaggatttcaagaccagcctggccaaggtggcaaaaccccatctctactaaaaatacaaaaattagctgggcctgctgttgggtgcctgtaatcccagcactttgggaggccgaggcaggcagatcacttgaggtgagaagttcaagaccagcctggccaacatggtgaaactccatctctactaaaaatacaaaaaaattagccgggcgtggtggcgggtgcctgtaatcccagctactcgggaggctgaggcaggagaatcgctttaacctgggaagtggaggttgcagtgagctgagatcacaccactgcactgcagcctgggtgacagagtgagactccatctcaaaataaataaataaaaaataaataaagggagcccaggggactgtccaccctgactgcaccagctgtcacactgctagcccacttctcagttccttgcataggtttacatcaataagtattattttgaagtaaatctcggacatcatatttcattttagtctgcatcttaaaagataagggatttgtttttaaccatcacaataccattgtcatactttaaaattttaactgtaatttcttagtatcatcaaatattcagtcactgatcaaatttttaattatcccactaatgctatatttttgacgcttgctttttaaaattggtattcagataaggtccacacactgatattgattgttacatctctggagacgcttttaatctacagatcctccatctcttttgctttccttgcaattttaagttgaagaatttctcagaaatttgaatttaatttcaaccgttccagtcaactttcttctctgttctttcgccatctaccgtctcacttccggctgttttcctcttattttcttttttccttaaagagagaaccaacttttgccctggaccacaggcatgtgtctggtaaaccaaaacttctctcatcaaagccatctaaggggcaatccgagtatgtccacagacatttccctgattggtctttatgatttggacatcaacacctttcagtatccctcaaaaccaccttcttatcatcaagttgcacactctaatttcttagaaccccctattatctttttaagctataggaaagacctgagtgttggagagagacaaatctgtgtccaaagtctagattctgccactccctagctgtgtgaatgttggtgagttgcttaccctctctgagtctcgaagatgaaactgagcccatatctgcatatctgcctataaggttgctgtaagcattaaatgagataatgcttgccaaacaacaaactcaattcctaagtaaacattaattcctttttcttacttgcgctatgctgtgtttatagatatacccttagcctctcttagtatcctttaaacctgcactgtctgataagatagccactagctgtatgtggctattgaggaaaatatggctagttcaaactgagatatgtgctataagtaaaatatgcaacagatttcaaaaacttcatggggaaaaatgtgaaatattgtattaataattttttacattgattacatattgaaacagtctttaggctgtattgagttaaatgaaatattactttcacatggtccttttgtgtttttttttttttttttttttttttagagacagggtcttgctctgtcactcaggctggagtgcagtggcgtgatcacagctcactgtaatcttgaactcataggctcaagcagtcgtctcacctcggcctccttagtagctgggactataggcatgcaccaccacgcccagctaattttttttttttttttcattagaaacagtgtcttgctatgctgctcaggctggtctcaaactcctggcctcatgtgatcctcccactttggactcccaaagtcctgggattataggtgtgagccaccatgcccggcccctttttacttttttaatgtggccactagatgattttaaattacatatatagctcacgttatatttccactggacagtgctattttagatcacagatggcaaactcaagtgcccacaggatccagatgagtaacataaatgaatgccttgttctggtggcatctgttcactctggagattgtctcttccccatctgaaggtcacagctgttctcttcactctgcagattggtgacatgctgggatataaggccaattttttcatttcttccagtactcaaatgaagttagaaaagcagtcttttataggaaattttcaggctttcaaatattggtaattaattttttaaagttcctaatacttcaaacagaacgtgtgtgtaggctagagcccactttgggccccagcttttgactgcttcagatagctttaaaggtctccatcccctgtacacatctacctttcattatgatgaaagacatacaaacctaggcgaggccctcactcaacactgcaggacatctctaaaggaatgcaatttcaatgggaatttaaggcaagaaactgtctgtaagacctacgaaggtaatgatatataaacgtataaaagagtcactttgagtaattaaagcaggagccgacctggcctagaaacatgtgggaaacacttggaaaaactgtggtgaaagggaaagtaatatcgggtactcaaaagtattaaaatttcatgtcttgtaaagatattctatactttgtcctgacaattctgattaatggggaaattgctgggatcttaatttattttaattcctagaatccagaatcatcaatgctggtttggaacttagagacagattacaccgttcagccctcttctcacagcatgagaacagaacactaaggcccagaaagtttagttgagtcgtctaagtaaaaataactagtttgaagcggggcacagtggctcacacctgtaatcccaacattttgggaggctgaagtgggcagatcacttgagcccagaagtttgagaccagcttgggcaacatggtgaaaccacatttctacaaaaaatagaaaaattagttgggtgtggtggtgtgtgcctgtagtccccgctactccagagactgagacgggaggatcatttgagcccaggaggtcgaggctgcagtgaaccgtgattgcaccactgcacttcagcctggcgacagagtgggaccctgtctcaaaaggaatgaataaatacataaatattaactagtttggtgtagaattgaagttgaatccagggctcctgactccaagaacagttagattagttttcaagagagttctgtatttgtataaccctgacatttccagtcaagttggtctgcattgcttgttagtaatcagaaaagggaattggattgctaatcttttttttttctctttaacacagaaagtcccattacagaatcctcccattaagtgggctgaaggacataagggagtatttaatattgaagtgcaagctgtttcttctgtacacacccaggtaaggaatgtcaaggttaatcatgaaggtaaaggtgcagcggaggagcctttgaaggacaggccaataaaagatcagtgaaaatccttgtctacagataaataaaaaataaccctttagttctttgtggggacatgcaaacctctttaggtttcatttgtcattggaatagaaagaccttacaaaaccgccgagcacctaaaggaaagaacctagtatctgcactgttggtggagaaactttgcagggggacttgatttgaaactctcatctgctgttacttcttttccctctgtaactctgccactttgccagcttttaaaaagaaattccgtactctctcctttacctgccactgtctgagttctgcatctgctgagacctctctcttggcagtatgcttacctggtacgctgacctctgcttacagaacatgtcagagccaaaattatttcttctttagctaataattattgaaacgttcaacttcatgcaccacattctacaaagaagttcatagcctcggtctgaaacatcatgtcttagaccttctggtctgaaacgctggataagaggttctacccataaagagctattcgattgtgtttgtgaatccactggtgaacattgatggtataaaaccccatgaggcctgccttctcccttcgcaggacaaccacctggagaagttcttcaccctctgccactccctggagagccaggtgaccttccccatccgcgtgctggatcagaaaatcagcgagatggcgctggagcatgagctgaagctcagcatcatctgcctgaactcctcccgcctggagccgctcgtgctcttcctgcacctggtgctggacaagctcttccagctgtccgtgcagcccatggtcatcgctggccagacaggtatgaacctgcagggctgggctgggaggaggcaggagcaagcaagcattgccttctttaatgaaaaatgactttccagaaatccagagacaatgtgatcttcctttccactgatgatgtgtgctcaagggaggccaagtcttatgctattttttttttgagactctctgcatgttggaaagaaaaagaaacattaaaatagggttcttaatattatagctttttgtaaactttattaaatgattataggcagtctttaaaattccatttctggtaattgatgaatttattttaccttgaagatatttttgttttcttgactaacaggaaatggaacattttaaggtaagacaacctgtgttaaatggagggaaggaactctctacattgaaatgcaatgcaatcaatttttaaagttaaaacataaactcactattttaaagtgtatagttcattggtttttagtatagtcacaaggttgtgcaatgatcgctacaatctagttttataacattttcatcacctccaaataaaaccccatcactccctattcatccctccccctagaactcatccgttctctcttacagtctattttaaatgcttacttttaacaagttaacactaaatacaatgtgtacattttcccttagaaataatctcaaaagcttatcctggaggcatgaccagagtccagtggttctcctaactcttccagggtagactggctggtatagggcatctttatttgccaccattttcagctgtgcctatatagctctttgctttccagtccagcagacgtcttttgggtaccatccatatgcccagtactgtactaaaagttgtaggctttgtgacaataaccaagagcatctcagacctcagaggacttataatatggcaaagagtcagcagcacaggacaagactcctcaaagggacacagctaaattttgcagtggttgtggggagggtggtatcaaaggagagagtgagaaaacatccatctgggaggatgcaggaggtccacataaagagatggccttgaagaagggatagagtgaaaaccgacagaataggggcaatgagatgagtgcagcactgcagagaaccagaaaagtgtgggagtgtcaggaagaaagtcagtagcacagttggtggtggaacagaagcacgtgtggaagtgggctgggacaatgaagtgagacggcttttagagccagggaggggcatgtccccttaatctctcactctgctttgcaccctgatatgcatcttctgtggttccacagatcaaacgtcctgtgttggaggctaacttttcatccatgtagcagttgcctctccagctagattcttgcagagctctgccctccttcgattactttctgtgcccccgcatatgtggcacactgctttgtatgttccagctagttaatacagacttgttcaccagacaaaaatatttatatgttttgagcagcttctccatagcaagttgccaccttgtggtgtgaggaccacagggtgttggcataggcagaataagtggaggtggctagtctacaagcatttattcagaacctattctgtgtctctgcaatggaaagcacagtgggggcacaaaagatgtgagaaatgcacttcgcatgggaaggattccagctttcacagacagacagtttaccaccagacatggctggagaatcatgtaactcagtttcacttgagccctgtactgtgtggagtcagacggcttcatggaggaggtgggacttgtgctgagattcacagggtcggtatgattttgtggatgggagtgaggagggcttcctaggcgaggacaacagcatgagcaaagtctcagaggtaagagagcaggcatgatgggacaatacaatgactgcctcattttaagggatgtcgaactgagccaaaaagggtacaaggttagataagtatattggagccaaactatagaggcttagggcaccagaacaagaggttctatgcagtaaatcaaatgtgtatgggcccactgtgggaatgacttgatatgcagacatttttaggttaatctgtacaagaatcagggttgtgcagcacatctcaaatcatagtgtccacaacagtcacgtgagcatcttgtaaagatgcagaacctgattaatacactctctggggtggggcctgagattctgcatttcttagtagcaagcaggtgatagtggtcgtgtgtgtccgcagcccccactgagtagcatcagtttacaacctggcttagagaaggaggacgtctggacagtcttatgtctttgtcattaaaaaccatcaatgctattcagtggcaggaggaggaagttcaaaagagggaatgtggaggcatctgtggtactcagagccagcatgccagagctcaccaaaaccatctacccttcccaggcctagttaaattggtcagcggtcaggactcattgtcactgtcctggagaaacttccacctcaggctccttaaggaccagctgtgggactacccatttttctcttggttcctcagccaacttctcccagtttgccttcgagtccgtggtggccatcgccaacagtctgcacaacagcaaggacctgagcaaggaccagcatgggaggaactgcctgctggcttcctacgtgcactacgtcttccgcctgccagaggtgcaaagggatgtgcccaagtcaggtagagttgccctgagtgtgggactctggtgggcggggcaacaccacctccaccccactgcagtgtaatccaaaataaaacatcctatgctgggtgcaggggctcacatctgcaaccccagcactctaggaggctgagatggcaggatcgcttggagcagtggctcacatctgcaaccccagcactctaggaggctgagatggcaggatcgcttggagcagtggctcacatctgcaaccccagcactctaggaggctgagatggcaggatcgcttggagcagtggctcacatctgcaaccccagcactctaggaggctgagatggcaggatcgcttggagcagtggctcacatctgcaaccccagcactctaggaggctgagatggcaggatcgcttggagcagtggctcacatctgcaaccccagcactctaggaggctgagatggcaggatcgcttggagcagtggctcacatctgcaaccccagcactctaggaggctgagatggcaggatcgcttggagcagtggctcacatctgcaaccccagcactctaggaggctgagatggcaggatcacttggagcagtggctcacatctgcaaccccagcactctaggaggctgagatggcaggatcgcttggagcagtggctcacatctgcaaccccagcactctaggaggctgagatggcaggatcgcttggagcagtggctcacatctgcaaccccagcactctaggaggctgagatggcaggatcgcttggagcagtggctcacatctgcaaccccagcactctaggaggctgagatggcaggatcgcttggagcagtggctcacatctgcaaccccagcactctaggaggctgagatggcaggatcgcttggagcagtggctcacatctgcaaccccagcactctaggaggctgagatggcaggatcgcttggagccagaagttggagaccagcccagggaacataatgagactctgtctctacaaaaaatataaaaattagcagagcatggtggcacatacctttagtcccagctactcaggaagaagctgaggcaggaggatcatttaagcccaggagttggaggctgcagtgagctatgattgcaccactgcactccagcctgggaaacagagcgagatcccatctcttaaaacaaacaaacaaacaaacaaacaccctaaaattccattttcgttttcaggacaatacaaaacttacatgaatgctgaaattatgtgtttctttatagatctttcttcctccctccttgcctctttttatgctctaaacacttattttgtctgcccatttgataatccctcactggtctttacccacttgctaatttatgattcagctgagaatctcttttttaagatggagaagtggtgactgatgcctacgattctagtataataaaggaaataatatatatccaatggcagtggttcttaaactttttgttattaaaaaaaatcccttttcacatttccctcaaactgaactattgaaataatagtaatgcatttccccaactcttcttaattatttacataagtaataatcaagtagaacttcttgtcagcatgatataaaaattagtgtcagtgagttcacaaaattgcaggcccaaataaacatgacacttttgttggtctgtgcagcctcatttctagtaaatctgaaaatttgattgagtttttaaaaatactagtgatgtggctgggtgcggtggttcatgcctgtaatcaatcctagcactttgggaggccaaggtgagcagatcacttgagctcaggagttcaagaccagcctaggcaacgtgacaaaagcccatttctataaaaattacaaaaattagccagtcgtggtggcgggtgcctgtagtcccagctactcgggaagctgaggcaagaggattgcttgaacctgggaggcggaggttgcagtgagctgagatcatgccactgcactccagcctggaggacaaagtgagaccctgtcttaaaaaaaaaaaaaattaaatagtaatatctcatagatttccataaccgcttgtgaaaacatgtcaacatttaaagatgaaaaacagtgctgtatacatcatataccgtaatcctcacaaggttcagatgactctatggatttttgaatctgagaaaacctcactgcatgaattgtaaagttgtcatttaaatattgacaaattaaaaatatccacatttttagcttctcatgagaaatcagaagctctagcaaccctggggtccatttcccgatggcagtaatagactggagccagtagtaccccctgcctttgtaagaggcatgtgttggctgtttaccatgatctccaccactccctggtgccttatgccccatctacttctctccaaaagattgcctcctaccccaaccaggatttgttaagaagtctctaattccaaggcctaatccggtggcttttcatccaccctatccctcttcaattccttcttaaactcagtaagtaactctgttcccctgtctgttgacatgtctctgcctggtggggtgcaggcgctcccactgccctcctagaccctcggagctaccacacgtatggccgcacatcagctgctgctgtgagttcaaagctgctgcaggcccgggtgatgagcagcagtaacccagacctcgcggggacacactccgcagcagacgaggaagtgaagaacatcatgtcttcaaaggtaggaaagatgtcaaaccgtggaaggggacacaggcttttttattttttaactaaaacttggagaagtaacacagaagcaaccactactgctgcccaccatgctggtcggatgctttaatgctcagctttggagtgattaacgttctttagaacagattaagaccattctgacagatgcagcagcaagaccagcatctgaggatttgctgagaactacttagcttgggtagcaaagttttaaagcatcaggggtttagccacatggagtcatgtggctaaaccatgcattttattttcaaggaaaaaaaatagctttaacttttgatacctggaaaggttgcctttaatttagttttgtttctttaatacctacctcttacgttcattaacatccacagattgattatctcacaaaaaagtccaaaggaacagccgggcatggtggctcatgcctgtaatcctagcactttgggaggccgaggcgggcggattacttgaggccaagagttcaagaccagcctggccaacatggtgaaaccctgtctctactaaaaataaaaacattggccaagcacggtggctcacacctgtaatctcagcactttgggaggccgaggtgggtggatcacaaggtcaggagttcgagaccagcctggctgacatggtgaaaccccgtctctactaaaaatacaaaattagccaggcgtggtggcacatgcctgtaatcccagctattcaggaagctgaggcaggagaatcgcttcaacccaggaggcagaggttgcagtgagccaagattgtgccatttcactctagcctgggcaacaagagcaaaactctgtctcaaaaaaagatacaaaacattagttgggcatggtggcgggtccctgtaattctagctactcaggaggctgaggcaggagaatcacgtgaacacgggaggtggaggttgcagtgagccgagattgcaccactgcactccagcttgagctacaagagtgagactccgtctcaaaaaaaaaaaaaaaaaaaaaaaaatcccaaggagcaatgccaaattttacaagcatataaaaactgacatcctgagagggttgatggcttgccctatgttgtttttccctctatgaattctttatttttttcatggtaaagctttactttcagaacagttttagagttacggaattatatactctatacccagtctctcctttattaacattttacattcaaatggtacttttggcacaattagtgaaccaatattcatggaatattattcattaagttcatctttattcacaccttctcagtttttctctaatgtcctttttctgtcccaggatcccattctgaatgccatattacattttgcagtcttgcctccataggctcctcttgctggaaacaatttcttagactttctttgttcttcatgaccttgacagttttgaggagtaatggtcaagtattttgtagattgtctctcattaggaattttttaaagattatgatattattcacataccataaaattcacccttttttaaaagatggagtatacgatccaacagtctttaatctactcacaaagctaccacgatgaattcttagcctgaattttttctccaatgatctgtggcctcagggtggccgagctattagagtaatatcatttcccctgataaagagaaatcaaaatctctaggtttagacacagacacagtttcacccttacaaattccagccacttgacactgtgtggtgtgaggaaggaaatctgcaggccagggtttggggctgggcgccaatactgccccgctgtgtggccatgggaaagtcatgtaactgtgctgggcctcatgtcctcatctctgcagaggtcctggtccctgaatgaacttaagaaccatctaccctgggtcttttaaaaacactggatttggccgggcaccgtggctcatgccagtaatcccagcactttcggaggctgaggcgggcagatcacgaggtcaggagatcgagaccatcctggctaacacggtgaaaccccgtctctactaaaaatacaaaaaattagccgggcgtggtggcgggcgcctgtaatcccagctactcaggaggctgaggcaggagaatggcgtgaacccgggaggcggagcttgcagtaagccaagatcgtgccaccgcactccagcctgggcagcagagcgagactacgtctaaaaaaataaaaataaataaaaaataaatgaaaaaaccactggattcaccccctgagatgctgatgatctgtagtttgagccatcaggaattattcgtattctatcctttttgacttacaaaaatcagttcagggatgtgctggagtgagctcatacctgttcccaaaagctgattgcttagttttccagaattttttgagccagttttgaaacagacattgttaaaattaaatcgtataaacttaaaattaaataagttatattaaaaacaaaggtaatctgaatgcaatgtggtatgctagattgtatcctggaacagaaataggacatgagtgcaaaaactggtgaaatccgagtcgttcgtgtttagttaatagtaacatatcaatgttagtttcttagttttgacaaatgtaccttactataaaagatattaagagaaatgcaatgaaagtcatataagaaatactacctttgtaacttctctgtaaatctaataataactatacaacttatacttcaaaattaaaagttcactttaaaaaggtaaacctagtcccttcctaataatttcactatatgctacaatatctaagttcttccttctttacgtttactgtgtctgtgtgatggaaatattatataatggtttgctaccacactgcatttctatgacatcgtgttggtagattgaaatcagttatgatgaaagtatttgtggcacaaaaattggcaaatgctacaaattacccctacccccctgacaactggttgttaaacatttgccagcacaacacaactcagcctcatattgaaagcccctttcagtaataccactttctgatcacccaggaaagaagtggtctgcagctattactgacagccttgatctttctatttttctttaataaaatgaaaatattaaatttttatgtggacagggttagcaattttcgaattattttgttgcatggggagaaaatgtctgatagagcatgagcactccacttcccttcagaggtagtttttgacaatgtattggtgtttaggagacagcgtggtgcagtaccgtactaaaccacagagagacactgttcccacacattttttcctggcgtcccctgaagtcacagactcctagaagggactactcagcagcccagattcttaaatagtttttaactgtaggttgctacacacaaactattaacgggtgttgtctcaagagcaagtaaaattaggtataacttcactgtctttgctttgttttatatttacttatggcaattgttttacctttgtaaccaggaaaaaaaatatgtataaaaaaatgaattctgaggttgtgatttccagatgtctggcttacctttccatggttggttgactgttaagccatggtttgtgtattttagatcgccgatcgcaactgcagccgaatgtcttactattgctctggcagtagtgatgctccaagttcacctgcagccccaaggccagccagcaaaaaggtactgaagagagcaatgtgaggttcatcccaggataagaacagaaggatttcctcatgccctcacactgtgcttgggaatagtcaaagtgctcccctgcctgtccctgatgtgctaacacacacacaccccacacacacttttgcagccctgtcctttacgccacatttgaccacctaattgcccattaactcagtgtttctcccactttctcatgcatcagaattacctggaagccttgttaaaactcatcgctggaccctacctcctgagtttctgattcaatagatctgagctggaggctcaagaatttgcatttctaacaagttcccagctgatgctggtccagggaccacattttgagaaccactgcattggcctccttttagtagagggaaagctgggcacaagtcatccttgacaaaagtgaatggcaataattaggtatcatttgtttcaataccatataaactaatatgaaatgcttcctcataattcttcacaatcagccttacctatgagttcagaaactttaaaagctgttaaactgcttaccaggatttttaaagcaacaaaattccccaatcatagtcccagcctatgtggtctgagggatggagggaaaaaaaactgtctgccctaatttcctctcttctaggcactcaagaatctcaccattatagtagctacttaagtttttaatgtctttgaagacctgtattaaaatgtaaatatggcagggcacagtggttcatacctgtattcccagcactttcggaggccgaggtgggtggatcacctgaggtcaggagttcaagataagcctggccaacatggtgaaaccccctcctactaaagatacaaaaactagccgggcatgatggcaggcacctgtaatctcagctactcaggaggctgaggcaggagaatcacttgaacacgggaggcagaggctgcagtgagctgagatcgtgccactgcactccagcctgggcgacagaatgagactccatttcaaaaaaaaaaaaaaagaaaaaaagggtaaatatgcttattgcaaaggataacacaggaagccatttgcaagagctgacatcacagggaaatgtttattaaacaggcaaggagggaatgagcctccccaagtctccctttggactggatgagggaaagaccaagtgtgggagggccggggcctggtgctgtgcactttgcagtattccaggcaccatatgtctagtgagaggtaccaggatttaactataaaaggaaaagtgaaaaaagatatggttaggctaaaaacaaattagtccacttgctctaaaatttaatattaggctatcacaggccctatgcagtgactggttataggtattataccattttcctttcttaaaaaccattatttgcctacagcctgacttctttaacccatgtcctgtttggtttcgcagttgccatgttttgacttgaaatgaccagaatagagacattttatttcaaagggaagtttggccaatatgtttccttaataccttagcagacagagttttgctgcttggctattttatataacctccagagcaaggtgttcttgtaataatgctgcccagaaagcagcatgaattactttaagaagcagcttatccttgtctaatctcttcttgccataagaccctggcagacaaactgacctattttctagaggcgacctttgaagctgggggagcatgtctttcctacaatgagaagatcaaggtgtagtccagttataatatgtgcacagttagaccacctgctagactaaaactcaaccccacgcctctctcaagtgagacagcttcacttcagactcacaacagcaaacaaatgtgttaacgcatattaaaattattaaggtttgactaacctcacaaaacgaagtgaaaccagtcgataagctgaaacacctaagcattctccattcctcaccactaacccgcctgggatctaattggttaaaatacccaagcatgtatacagagattttccttttgtcatcttttagtttagctaagtagctctcaaattttaatgtacgcaagaattagtacattgggttgcatgcgtactggactctgtgggtaatttttttttttttttgaaacagagtctcacttactctgtcacccaggctggagtgccgtggtgcaatcttggctcactgcaacctctgcctcccaggtttaagtgattctcctgcctcagcctccagagtagctgggattacaaccgtgaaccaccacatctggctaatttttgtatttttagtatagatggggtttcaccatgttgaccaggctcgtctcaaactcctgacctcaagtaatctgcctcctcggcctcccaaagtgctaggattacaggcatgagtcaacacacctagccctctgtggataatttaaacgactgtcaagagcaatgtttgctgtaatcagtttttgctttaggtgttgactttaaaacttaatttgcaaataaggatatgatattagggtgttcaaatagctttagctttcttacctactttcttaccagaaaaaaaaaatgagtttatctacgtttattccaggttttgtgggcataagatgaaagaaaaccacagaaaattcccagacatcatttttggcattaattagggtgaccaactgttctcatttgcccaggactgagggagtccccaagatgtaaggttttctattttaggaccaggacattatcaggcacactgtaatggattgattgccctacctttagtcttgaacttcttcctcatcaaaatgattgtcaggaatatgaacacatagccagatatgctgtagaatggaaaaggtataagtcaccctgtgcactatttgctactgagcagtaggtgacttgaagggaagtgaagacgcaaagtggagctgggggactttccaagcatctggccctgggacatagacatttagatgttgtaagttaaggctgatactactatgcctttcagagcccaagatcctctcataaaccccaccgatcctgcttcccacaatgccatatgggcattataaaaacaaaaattgtccagtctcctagagagtttagacaccatctagacagtggtccctaaagtgtaaccctggaccagcagcagcagcagcagcagcagcagcacccaggaacttgttagaaatgcaaattcccaggctattgaatcagaatatctgggggtggggccccccagtctgtgtttcatcaggccctgcaggagattctgatacacagaggccgggcgtagtggctcacacccgtaatcccagcactttgggaggccaaggcgggtggattgcttgagctcaggagtttgagactaagtgggcagcatggcgaaaccccatctctaccaaaaaaaaagaaaaaagaaaaaactagctgggcttggtggtgcacgcctttagtcccagctacttgggactaaagtaggtgggaggattgcttgagccagggaagttgcagtgagcgagattacgccaccgcattccagcctgggcgacagagtgcagccctatctcaaaaaaaaaaaaagtttgagaactgctgccaccaaccaactgattttatggatgagaaaactgagggtgaagagaggaatggcttgcacatggtcacacagagagttttcagcaggacccaagaggaaagtaagacagtaccagttttaatggctacccagaatgtttcccccgtagaatagagtttcactcccaggctgagtccactccctcagatgtgtctgtcctgtgcagcactgaccccagccttctatgcaccgaaatgtcctccagtctcaggtgatctcagcactgactttgccatccaccacttactgcctagaacatctaagacacatgcttcaggaacgaacaagctattaaattggggggaataaaagaaaagaaaaaaagtgttggtgaataataatagcctttgtttcacagcctaatttttgtggttcttatttagcatttccatgaggagcttgcccttcagatggtggtcagcaccggaatggtgagagaaacagtcttcaagtatgcctggttcttctttgagcttctggtgagattcttgcgcgtttgtatctgtgctcaataggccaagagaagcacacagcagaaaggaattgacattttgttcactgagttgcccctgctgaaaacctggggtggtttcttgaaatctaataatctctcacccctcccatccttcttccactaaattgtgttgcttctaccatgaaaatctatcgccgtcctgtgagttctcatcaccttcaccactctccacctggccacacaccatcatctctcatgtgcctctcgcagtgacatcctctttttcctgcctgtatccatttttgctcttggcccacccattctgcacatggcagccaatactaaacagagaatgtcacgctccttttaaaaaccgatcgatgattttcactgcactgagaagaaagcacaaatttttatcatgacctaaaaagcccttgtatgattctgttgttttcctccctctctaacctcatctcacgccacattcccccatcattcagccacatggtcctcttttggtgctttgaagatgccaaggccattttggcctcacagccttttccagattctcttcctgctccctaactttcacctccgcacccccaacacacacagtttctattcttctctgtagatttcagcttcagtggaaccatccccaagaggccttttctgaccacctaatactgtaatatatcttcctctattatcctccttctgagcaccctatttatttctttcctagtggttatcacaatttctaattgttttttctgtctcagcggttagattttcaggatttgggtctctcttgtgtattatcccatctctagcctcagcacactgcttggtaccatgcaaggcccaattaatatctgttggaaaacagaatgaaatttgtatatctgtttatcctaaaacttctaccattactcgagcagaaaagcaaaaggtatagccataataccttaattttaaaataaggggaataatagtgataactatttttttgtttaattattaatggaagcaaaaggattttcccatagaggcactaaaaataaacattttctcaatgttgataaacagagatgcataatgagatgatgttgaatgaaagaggtctaaagacatagacaccaactatataaaaatatatatgcaaacagttcagaggatttggagtaggttgagatttagtgataatgttagctttatattcattgggttctttcccctgtcccattaagtgaatctttttttttttttttttttttttaaagagagtctaggctgggtgtggtggctcacacttgtaatcctagcactttgggaggctgaggcaggcaggtcacttgaagtcaagagttcgagaccagcctggccaacgtgacaaaacccatccctactaaaaatacaaaaattagccgggtgtggtggcgggtgcctgtaatcccatctactcaggaggctgaggcaggagaattgcttgaacctgggaggcagaggcagcagtgagctgagattgcgccattgcactgcagcctgggcaaaaagagcaaaactccatctaaaaaaaaaaaaaaaagagagagggactaaagagatgggaggggttccacctaagctctagtttttgtatgtaagttgaagcccaagaaaaagggagaaatgctgaacaataggacacagagaacaaagggcaaaggaaacaaatgaaccatccactggggaggaaataggaagcaatgtggaatagagttcagaagaagtcaggttcatgccacagaaacacacccaggattcaaatcccatgaagttttgcaaagtcccaacctctgttttgagaagggtcccaaagcatggtcccaaatccttgccacagaaccacctggaggtgcttagtaaaaataaagcagagattctttctcaaagcactaaaattaggaggctggaggccagcattgtgcatttacctgtcttctcaggtgacttctaagcctgttaatgatccactggtctacaccacctctgttctgtgaatcctatacagagctacaggtcttttggaatttgtactcagacaacaccagaatttttttttcattccaaaagccgagctaattaaggtggtggctgcagctcacaagtcttggggcaagagcattaacaatgagacatgagctccatgctctggcaggaaagggactgggccataagacccattcccctcttgtttcttgaggcatgagaagtatcaaaaccgtcaccccatgccctttatatcctgcttctatttacacatcccacccaccatcatgtctctccataaagaagattcactcagcctagctctgcaaaaatgaaaaaattacctgggtgtggtaacatgtgcttgtagtctcagttactcagcaggctgaggcaggagcgtcactggagcctaggagttcaaggctgcagtgagccttgatcatgccattgcactccagcctgggcaacagattgagaccctgtctcaaaaaaaaaaaaaaaaaaaaaaaaaaaaagaagaagaagaagaagattcacttgagtcataatccagctatggataattcatacaaataattcattcccaatgcggaattcagcattgcttattctgagtggttccatgtggcatcttagagctctctttccaaaggaagtttgcattctctgcaggtgtaatgatgtctctgttcttcacagaatcccaataatagttggcataccaatagttggcataccaatgggagaaagaataatcacatcaaaactactgagcatcttactatatatgtgccaggcagtgttttaagcattttaaagcatcatctaatgtaatcattatgcaatcttgaggcaggaggaacttttattatcccaaatttacagatggggttggaggaagggtggtggccataaagagagtctccaagtcagccaaatgcttcagcagtaccacttcactgcccctaactgcttttggccttgcacatttatttactagggcttcgttggcccaggagagaaagcataagctaaagcacatggcccatcttacctctaggaagtcccttatggtaaacagatgaagttttttgggaagaaagcccctgctgatctaagcatattgcaggggtttgtcaacatgcagatcacccaagacaccagttctaccagcagcctaaaacctaagtctgtcaggttctggcaggacagagtttccgttgcccaaaagggttaactgaaaagcattgatcaaaaggactctgctcagcatgtatgggaggttcaggggccaatgaggattggtgagagcccccagggtacagcagctggcagaagcctttctctatgctagctctaaagaatcaagagtatagcagagtaactggggcctagaaaaatctggaggcagatgagacaatcttagaaaaggagcctggggccttagaaaaatgttgccactaccaggacctcactgcagcagggatgagggcagtggaagtgagtaactacctgggcctctctgttctcccacgtaatgatccccttgtttgtgctcctgttggccaactccaactggaagccaaaggttaagggggcctgagtgatgtggtccctcgagacccccttcccagcattcagagacagacagagaaggacaagaaatccatcagggagctggggtaggggcaaatggaaactatcatcccccagccagaactttgcaaggaaattgatctcagactcagacaaggtgcccaattcttcatacattgtttatgcatttgcctgaccaatgcccaggaagttatttgaaaaccaaaacagttttgttttgtttttttccaagaagcttgagaaagacaacagcttccttggccttagccaacaacctgggcaatttaacaccctctagttgtgtcagtgcccaagcgctaatgaacaaccactttggcattagagctgttaaacacaatgcttgggcgactttcacacttgctaatgaataaaatccctgtgcttctagaaactgctgagccagaccttggagaaatagagataaatgggtgacctagtttactcactcaggacatgaagttccacattaaggggttctttagaggtacccttactttaaatgggccacaaaggcccatatagggggaaagatttctgtgcctcgccccactcaacagggccaggcctccactagtgtttctactggatgttcttctctggagatctggaggacacagtagctggcaagctgctgacagtctggaaagaggccattggttggaagtatggtattgtgagaattatgtatttggttgtaggatggccaaactcagcagacaggagccaaatacagcagtgagttctgaaagccttagtgctgggatggttagcctgcccagaatcaggattggcattgcccaaaacaaagaggccttatcttcttaagtcctttgttaggagcatagtgagagagaggcttttttcggacaaaaatgggtccagttcccacccttcattcgggtcttctcaccaggtgcatgcggccttgtgggatatgaagccatctctgtgtcccaaaccaaagaggatgccgccatgaggagaaaccatggtttctctactgagctttagggtttgatgtccttaggtcttccctgagctggccatggcgttgtctgaaaacatgaaacacataaagcctgtgtctctggttttttcttattttgccttccctttgttttttctgtttgtttccatgctaacaaaaattgccagtgctgcatgcatccttagaaactgaattctgctgttagtgtattaacgttctctcatgtagctcctgggagtggaagtcccctcttcttccagtctcaacacagagggcaaatgtgggtggttcaacttccagtgccattagtagtagtagtagtagtagtagtagtagtagtattgcagtggctgtctgactaatctagacgcatacatgaaaacgttttcagagtgtagggacccaaccacaagaccttctagtcttccccatgttcctaatagtgtaagcaacttccaacaaggataagactcaccctcagatggtgacaagggggcccatattgacctgtgaatctcctggccccaagaagatgtccaaaaaataagcatgatcttgatttaaaattgtggtaggcattgagatagtattattctagtcataatgcagacagtcaccaattgacacaaggatatctatatatagatacgatatgtatatgtatgtatatccatatagatatatctgtatataaatatctttctgtcagttgacgaattgtttgcattatatatgtaaccacagtatacaccagtttgtgtcaattggtgacttgtattgacacaaagatatctatatagagatactagatatagatagataatctgtatatagatatttttgtgtcatttggtgactgtctgcattatgtaactaaaaattagacttatggaactcaaaatttcccctagaggtaatgttttccctggaggcaatgttctaaatagtggttctgtttccagctggccaacatttcctgctcaatatataatatagctaaaatttataggagcagaagataactgctggaaactatagaactgtttctggaaaaactgtgctccctcgagaaacactgaaactcaagataggaggaacatttctcccacgttctccttactgtagtttcaggaacagaaaagactttagttcgcatcaagaaccttgtgataaactgttcctttctgagtcatgtgttctgtcctatgatagaggacacctagctggttacaggagcccagctcaggtctgccttccaggatgtaggcagttgagaacactgtagctaaagaattaagctcctggctttgtcagcagcaagaagggagcctctgacttggggtcaaaaagaggacacccttcccacctcccgccaccatggtaaccattggtgtgtctgcagcattttagtccagagcttgctcgggcaccaccagcacagataaagtgtcagaaaatccattgttagagagcatttctgtgagtctttcccccttttctgcattgtacaagcaggtcaccaatctccatgttgacatttcctccatccccctccgcaggtgaaaagcatggcccagcacgtacataacatggacaaacgggacagttttcggaggactcgtttttctgaccgtttcatggatgacataactactattgttaatgtggtcacctcggaaattgcagcccttttagtaaaaccacagaaggtaactgtattttactctttattttctaaattgtttacctggaacatatattactttcataatcagagaaaaataagcatcattttaaaacaataattaaaatataactgtaatgacagttaaacgcagtatgttatactggactggaccctgatgtggggctggaaaattgttataaacaaattacacacatgaggccaggggttcgagacctgcctggccaacatggtgacatggtgagaccctgtctctactaaaaatataaaaattagctgagcatggttgtgcatatctgtaatcccagcaactgggaggcagaagcaagagaactgcttgaacctgggagacagaggttgcagtgagccgagatggtgccacagcactccagcctgggtgacagagtgagactctgtctcaaaaaaaaaaaaaaaaagaaattgcaatatggactgtggtttaaatgatcatatcaggctgggtgcagtggctcacacctgtaatcccagcactttgggaggcaagggtggtcagatcacttgaggtcaggcattcgagaccagcctggccaacatgttgaaaccccgtctctactaaaaatatggaaaattagccgggtgtagtggcacgtacctgtaatcccagcttctcgggaggctgaggtggaagaatcgcttgagcccaggaggcggaggttgcagtgagccgagatggtaccacagcactccagcctgggtgacagagtgagactccatctaaaagaaaaatgtagatatgaaagataatatttttgctcttaggaaatacaccttgaagtgttatggggtaaatgggcatgatatttgcaacccattctcaaatggttcagaaaaaaatgtttttatgttcatagaatgataaaacaaatgtagcaaaatgtcaagtattgataagcttcgttaaagggtatacagtagttctttgtactattcttgcaccttttctgtaagtttaaaattgtttcagaataaaagctaaaacatatataaaatggaataaatcaaatgtttaaaaggcagctacaaaaatcttaggaagcaatgtttattattaatcgctttgtcgttattgagaatgtgcatagtaccaagtgctcaggagattttcattcggttattcctcatggcaaactttgttggaacagcatggtatctccacattggcaggtgtgagaataaggcacagtgaggttgataaattttccaaaagtcacacacagccagcagtaaagccaagactggagattttagacccagatactgagtcacgtaaggcacccaggaggagtggccatgtggagaatgcggagagagttcgaggacctctcagcggcacggtagcaacctctttatcaggtccccatccatcccagtgacttgactggtcagcatggcctgaatttgcaaattgcatgttaacaaaagcaaaatagtttcaaaccatatttttaatagtgtcaaaggaaattgatttgtcattctgagaataaaggacataaacatgaaaaactgaatcccagattgctctgaagcactgtaaaatccctcataaacaggagcactgagaaataatacaaattaaaaattttaaaaataggcgtagcttattaattgggattcatggaggaatttaccctacggagtgaatacaccctgcggagtatgactctgacctctcttaggctggaaatgctgcctaattgaggaataaatttcttaggtaaaaactaattcttttatcctgattggattttctgtaataatccttaaaaattaagaaactgtctcattgaaaacagtaagtatttttcaagtcagtttgccaaaaaaaaagaaaatagttacaaaaaaaaaagttaccaggatataaaaaaaagtaggatccaacatagtatatagagaatgaggttaattatacacatataaatatgcatgtagaaaaaaaagtgactggaaggaaatgcacctaaatattaacagtgcacgaataattacttgattcaacctcacagtcatggctttagttaaaggagactcaactacttcgcccagtgccacccagaaggacagtggctgaaataataggacctgtctctcccaatgttcccaccagtgacctggaagttcaaatccagagtgtcccacaaaatgatttgggtgtttgtttgtttttaaggaaaatgaacaggcggaaaagatgaacatcagcctggctttcttcttgtatgaccttctctccctcatggatcggggctttgtgtttaacctcatcagacattattgcagccaggtgagtgtcccccccacccccacccccgagcgagccacttggttccttctcatataatgtgatgttcgttgccatggcacgctgtcttcttcattactgagttggcatgaatcctacacatcctgtgttttgcagcacgtccctcatgtctgtgccatggacattcctcagacatgctggtttaccttgattcctggagcatttaccgacagtgtagaagggtcaacagattcatctgtgggaattaaaatttgtgatatgatctgaatcttcaatttgacattcaacagaaaattaacatggctatacagtgctttcagtctttgacaagtccttgcgctcccagtctgaggtctcttttcacatattagggtaattaattaaattgctgttgtgatgctccgacttgaaagaacctttttaaagtgttcttaaataaaatcattcaaagagatttaatttcactgagcacatagcaaatatttcataaaccaagtgcatctatcagtgccatccccccagatttttaaatggaattattcatgtgctgtctccctcaaactaccttaacaatagtaatataaatagcagttattgttgctgctcctctccttccatatccctaatctagccactagtaccatcattactgctactactaccaccagccaccaccattctcattagtcccatgcccactatcaccaccttctccaccatcaccacctcccaccacctccaccacctccaccatcaccaccacctccaccatcaccaccaccacctccaccatcaccacctccttcaccatcaccatcaccaccacctccaccatcaccaccaccacctccaccaccaccagcatcttcaccatcaccaccacctccaccatcaccaccaccaccacctccaccatcaccacctccttcaccatcaccatcaccaccacctccactatcaccaccacctccaccatcaccaccacctccaccatcaccaccacctccaccatcaccaccacttccttcaccaccaccaccatcttcaccgtcaccaccacctccaccaccaccacctcctccaccaccaccacctcctccaccatcaccacctccttcaccatcaccatcaccaccacctccaccatcaccaccaccacctccaccatcaccaccacctccaccaccaccagcatcttcaccatcaccaccacccacctccttcaccatcaccaccacctccaccatcaccaccaccacctccaccatcaccaccacctccaccaccaccagcatcttcaccatcaccaccaccacctccaccatcaccaccacctccaccatcaccaccaccacctccaccaccatcaccaccacctccaccatcaccaccacctccaccaccaccagcatcttcaccatcaccaccacctccaccaccaccaccacctccaccatcaccaccaccacctccaccaccaccagcatcttcaccatcaccaccacctccaccaccaccaccacctccaccatcaccaccacctccaccatcaccaccacctccaccatcaccatcaccaccacctccaccatcaccacctcctccaccatcaccaccacctccaccaccaccacctcccccactaccaacagctccttcaccatcaccacaacatccaccaccaccatcaccaccaccaccaccacctcctccaccatcaccacctcctccaccaccaccaccattagctccaccatgaccacctccttcacctccaccatcacttcttccaccatcatcattgtcaccatcatcaccaccaccacctccaccaccatcaccacctctcccatcaccaccacgttctctgtggttagtcacttagtgactttagataagtttttccaattttatgggtcttaatttcctcagttttaaaataagaagggggggttgagagatttgagggctgatcaacgaaaaggataggaccataaaaagcagtgacatacaagcttcattgagcagcacttggacagggttacataagagcggaagcccctcccagcatgagaacagccataggcctgcagtgaggaggggaccatccagaggagcaggggaactcccaggggagaggaggattagggcagaagcttatagatctgggtgaggctgctccacagcacagtagggagtctctgggtcagagagctccaagggctgtagcagcttagggccctgtatctgcaaggctctatcttatcattaggaaacagctgtccatcgagattttatggggtctgcaaaggaggcaggcactaaatggatgaaaatctgcttatatgagctatttttgttaatgactgggcatggtaaaatttgagttaggtatgagccaagggatcagcaccagtcgacagtgaagaaataaacaaccgaggggccaatacacagaaacaatctttgacttgtttacataacacctctcctccaaaaaaagaaaaagacatgacttttctaaaggaagtcctgtctacagccataccaccctgaacgcacgcagtctcatctaagggaagtcctgataaggaagcagaataataaaaaagaatcctaaggaaacatcagaagtccccaagcatccccatcccatgcaccctgacccctgccctgcagcggatcttctgtcccaggacccaccagaatagaatggcagagggacacttcactcctccttgccctccctcttcagtatttaggattccaggttagtctgttttcaaaactttaagttgagtgtatgaaagataccctagatcaccactgcagacccaggcttagctactcacatgcaggctatcttcattcccgacagggaaataaggcaacccaaggtagatatctgccttccctgcaaaactcatgtttttattttctctttctctttcctttcttttctcttgctcactatctttctccttaaattcttcccttttcttttagttaccatttctttttttgtttctctccttgactcaaatgccaaagatccctagaccaggagtcaagaagcctgcatgctgattcctgggacaccattaattacttctgtgattgggagcatcagcctttgaggcattcatttcctcatctgcaaaaaaactaggctggattagatttatccactgattctgtggtctgtgtctgccagtgacatccacggatgttacttagcaccattagtggcactcaggcctcagaaggtcactgacccccattcgtggtgatttaattcattgatcccagctctctagatacaggatgaacttcataccttaagcaagttgtattcttacaaagtcgtctgactttatcattttgcataacctattatgttttctgccatctaaagattttgtggcaatggatataaccttagtcttttttaatagtcactaaaaatagacaaatccatttcctcaattactgtctgtcacttacaatgtgccactaagcaaacacccatcccttgggtaggggcattgtgggtcttgacctttgggaaggaagtttttggaatgcaccttactcctcttttcaaaacatcactcaaattgtttttgaaatgtctattttttttcttttgagatggagtcttactctgttgcccaggccagagtgcagtggcacaattttggctcactgcaaactccgcctcacaggttcaagcgattctccttcctcaccctcccgagtagctgggattacaggtgtgtggcaccactccccgctaatttttgcatttttagtagagacagggtttcaccatgttggccagactggtcttgaactctggcctcaagtgatctgcctgcctctgcctcccgaagtgctgggattacaggtgtgagccaccacacccagcctgaaatgtctgtcttgaatgatgtctcaagggacctatgaaagatacccatagtggggccttcttttaagtgccaatgtgttgtgggttcaagttccgatagccggcttgacccgacacctgttaatgagtaacctaagtgacaggcacatgaccaagttctaatcccttcaatgtgctggtggctccactggtccaaagtcagccaggagtgcacatcgaaaggttatgggatctggtaactgtgcttacatagaagtcatatgttttggttttaaaataatatataatggcatttacttattttaagtggatgtctaactatgaattaattctgtaggcaatatgtcccacaacacattggcttcttgtaaaatggctgaaaatatgtgttcatttaaattatattgtttagtctgtaatcccagcactttgggaggccaaggcgggaggatcacctgaggccaggagttcgagaccagcttggccaatatggttaaaccccatctctactaaaaatacaaaaaattagctgggcatgttgatgtgcacctgtaatcccagctactcgggaggctgaggcaagagaatcgcttgaacctgggagatgaaggttgcagtgagccgagatcatgccactgcactccagttcaacagagcaagactctgtatctctctctctctctctctctctctctctctctctatatatatatatatatatatatacatatatatatatgtgtatatatatatgtgtatatatatatatgtatatatatatatatgtgtatatatatatatgtgtatatatatatatatatagtttaaaaaacaaactactcttgaagtgagtgaagaggaggcatgtctatcacaaggatgatgcttcatatttctgtgctggggtggggggtgataatgatgaaatattgaggagctcaaggtgcatcagcgccccttccttcccctattttgcctttagaggagctgcctctgagtctgggtctttcagttgttcagcttgcctgggggaagcaaggggtctcttccagacagtcacctttttctgcttttcattgcttgcttcatggtttattttttaaaggaagatttttcctaaaaactcttctagctttctttctctttcttctccatttcctcctctctcagtctgggacaagctccttgagttttttgcaggtactatgtactttgctaaacagtttgatgcctttctctagggaactggttctacaactttccaatggggcctttaattagaaactacgagagaacacttgtagtataaaagtcatctagtcatattctattagtttcatacaggctcatatgaggtcaactcctttcatttagtttctcgaacatagtagagtttttgtaaaattaattatgttacggtgaagatgtacctcaagattttcagcacaggcttcccatggtattaaagatttgataaagtggaaatcgggataagaatcctcattctggacagctactaggctagaatcactaaggggaacagtaatgaatgaaaatttattagacctctctgtaatgcagaatttaccatctgttgcactatcccattagtttttattaaattgattgccttaacctggagagaaaggatatttttgtgtctgccaacctcaactccacttaccttgtaataaatgtttcattcctcttttcatttttcttcccagctgtcagccaagctcagtaaccttccaacgctcatttccatgaggctagagttcctgagaatcctctgtagccatgagcattacctcaatctgaaccttttttttatgaatgctgatactgctccaacatctccttgtccttccatatcttcccaggtaataaaagaattatttaactaaaa

SEQ ID NO: 15555 - DNA, 67571 bp, Homo sapiens
ttttgtctcctgtaacaatttacgcgccgtgtaactgtgaatctttcaaaggtatgttttactggagtgatttctggttatttcagaaggataatttgtgtgttgcgtcattaatgaaatagtagtacgaaaaacctatagcatcttttactgcaggaggtaactttccatgccattttttcagaaaatctacttatgacttcagtggcttgctagactggcctttttatttgtacttttcctgtgtttcagaattgcagagtataataaaggcatgtcaagtgcatattgtgtccattttcaggtatattagataagctttacaccaagataaattagatatgcttattggtttaatttgtgctaatatatatttaattgaaaaatcaaaaaaatttttttaaattgactgaagttgtattccaaaacatgcaaaatttagtttaaaatagattggatacacttttaaattttaaacaaggtagagggtttagtgctttgcttttttaaaaagtaaatgaaggctgcagctttctgcagtagttgtcttgggaagtagtgtggacatcactcctaagagacgttaaggaagtttagctaacaggctttaaccctttctctccataccagcttttactcttttttttttttttttgagatggagtttagctcttgtcacgcaggctggagtgcaatggcaccatctcggctcatcgcaacctctgcctcctagttcaagcaattctcctgtagttcaagcaattctcctgcctcagcctcccgagtagctgggattacaggcatgcaccatcacatctggctaattttgtattttgagtagagacggggtttctccatgttggtagggctggtctctaactcctgacctcaggtgatccgcccgcctaggcctcccaaagtgctgggattacgagcatgagccaccatgcccggccaccagcttttactttaatgccacagccttaaattttctttcaggagaaattattttatgtaaagttacaaaggaaaataatgcttaatatctgtaagcattcgtttggtaagtttgctgcctcctcagtaagttttgatgaaagtgaattttgatgaattactaccttagccgggtagtgacgttaacatgtggcttagctgtccattttctaagatatcaagaaaccagcaacaataagtaaaattgttaaattatgcaagaatcacatgttcctacctgtcatcatttagtcttggttctatttgcatgtgaatatcctttagaatatattactcccagttattccgctttacttttctgaatctcttttcccatctcttgacttcaacttcagtatatggctcttgttccttctacctggagaacggaggcatgtggaagcccagaggattgaattcttttttttttcttttctttcttttctttttttttttttagatgaatagtctgcttaggaaatccatctccataatgtttacctggtatcgtgttgtaatgtcagaatgaagtggctgttcttccccttgagtcatcgtcccgaatgaaggttccccaaaagaaatcatcaacttatgtggtgatttccttttacctttaaaaaaaaatttcttttcatggaaagataatggaacatgtcggtaagattcatttctaggaaggcaaaggagtagtttatcatctaaagactctcaacctaaagctgttttagaaaactttccttaaaatgagaagccgtaggttttcgttgcattattttggctaattgaaaaataagaccaagtgcgttctgaccttcgtttctcttacctttatttttacaaccaccatttcaatggcccacttgctgatacaaatgattgtttaattttaaaaagcatttaattgaagtcaagttatttagaacctaatcatttacacgtctttgttgttgctgctgttttgcaagagtgaagagcttggagtcaggtgaatctgggatgaggtacagttgtcatttattagtcatgtaatttgtgacaagccacttaatctctctgaagacttcagtttcttcatttgtaaaattggcataataatgctgtccctagtagggaatatagaattatataatgggtcctttgtatatattggctagtattgctctcttacgatttggcactatggagacactgtgggagattaaaagaagatgatgaataaaaggtgacttcagctctgaagggctttatgatccatttgggagaacaggtaatgtagaatatactggcttcaaaagtggcaggtgtttagaagagaaaaggatacatgatgtgataggaggcaaaggcttgattgagaaggctgagaagacttagagtaagggttctcagccctgactggacattaaaattatctagggacaattcaatcagaattcctgggggtggggaccaagcatcagtattttaaagttccctggggactttaacttgaagcccaggttgagaatcatttaaacagctctgttatttatttatttaaaattttaatgtattttttgagatggagtctcgctctgtcacccaggctggagtgcagtggcgcaatcttggctcactgcaactcctgcctcccaggtccaagctattctcctgcctcagcctccccagtagctaggaatacaggcgtgcaccaccacaactggctaatttttgtacttttagtagagacagggtttcaccatgttggccaggctggtcacaaactcctgacctcaagtgatccacccacctcggcctcccaaagtgctgggattacaggcatgagccactgggcccggcctagttttactttttttttttgtaatggaatttccctctgtcacccaggctggagtgcagtgatgtgatttctgctctctgcaacctctgcctcctgcgttcaagtgattctcctgacttagcatcctgagtagctgggattacaggcagctgccgccatgtctggctaatttttgtatttttagtaaagacggggtttcgccatgttggccaggctggtcttgaacttctgacctcaggtgatccgcccgcctcggcctcccaaagtgctgggattacaggcttgagccactgcgctcggcccatttaaaaaaactttaaaggtagacgtattccaaatggggggaatatataaagaaaggtaacacttattttgccctgtgtgctttgaatttcagaaggtgtagtaagcaaagaccacttactaaccctacagatatatccttagaaaatacagtggtttctgtcataaatctgataaatcagatgagaggaagggtgtatgtttgatgttgatttttctttttgttttattggggtttttaaaaactataaatatcaggtctgatgactatgtgtataaacattttctaagtagataaaatattttcaaattttgcattttttagtatgaaggggatccatcatttgaagttggttttctagatgtgatgataaacttgtcccaggtctatttgacactcctaccaaaatcctttgtgaccagggctagaaggcagctgtggctagtaaataaccctgtgtgtagactcacttattggctttggcattctctattgccacagctgtgtgaatagattaaccagagaccctctggtgccagccacctattcaggcaaacaagtctataatcagtacctctgttaaaatgaaactgtaatatactattgtcttttcatttatttatttatttatttagagacagggccttgctctgtcgcccaggctggagtgcagtggtacaatcttggctcactacaacctccgcctcccaggctcaagcgattctcctgcctcagcctcccaagtaactgggaccacaggcgcaccattgcgcctggctaatttttgtattttttttgtagagacggagtttctccatgttgtccaggctggtcttgaactcctgagcttcagtgatctgcctgccttggcctcccaaagtgctgggattacaggtatgagtcattacacccggcctattttctgattgttcaaagtagaagccaggcacaatggctcatggctgtatgtaatcccaacaatttgggaggcagaggcaggaggatagcttgaagccaagagttcgaggccagcctaggcaacatagtgagaactcatctctacaacaaagttaaaaagaaaaattagccaggcatggtggcacatgcctttagtcccagctacttgcgaggctgaggcagaaggatcacttgaactcaggagttggaggctgcagtgagccatgattgagccacagtactctagcctgggcaacagagtgagaccctgtctcagaaaagaaaagagaagagaggagaagagaaagagagaagagaagagaagagaagagaagagaagacatacaaaagaagagtaacatacaagagaagagttaggagaccctgtctcagaggaaaggaggggaggggaggcgagaggacaagagaagaaagagttaggatctatgccctaaggaagtaaggaggatttgagactgtgtaggtggttaataaccttaagctacatattttatggagggaaaaatcctatttttaaaagtgagaatagaacaattttgaagtgaaatggaatgaattagctggaccataacggctctgactgaagaaaaggatgtaaaaagccacatcctggatatgtaccaaacaccatggttacatggcatgtttgtatatgtaacatttatttaaaaaaaaagtctcatagcttagaaggcatttatttttgttatgtgtataggcttctgtgcaataaagcagccttttttattttacagctcatgatgacttaaatggttaattgcctgataaatatggtcctcttttattcttctgattctgttgttcttttgcacttcatctttcaaggggttgggctattcttaggtttcactgattgcactggaagggacatgacggaaaatgaagatctcaagataattttcttgcaaattcacaatggaagataaaaggaaagagtggcaggcattctgcacacagagcagacgtttctttattgtcattgttcagcagaggaatcaactcagccttggtgaaactagagtgatgcccatggtggcatgtcagcatctccctcttagtggcatcagtgctagattgttgttgttggaagcaggagagtgtttagtccataaagtacagaacttcgatatcacagaagctagaagaactttactgccttcagcttcgtttaaagatagtagagagcttactcattcgttttagaaatatgtattgggtctctatgtcaggaactgctggcacagcagtgagattgaagatacaacagtgaatacaatagagggcctatcctcatagagtttgcctttcagaatgagggacagacgcagacaaatagaaaatgtcgattgtgtcagggagtattgagggctttgaagaatgaaatcgtgacccagaagagatgcttttagattggatcatccgtgaaggcctctatctagaaaggagacacttgggcagaattctgaatgaacttgacggacatctgaaggaaaaatattccagtcagaaggaacagtacgtgcaaagtccccaaaacttcaataagtgacgtgctccagaagcagcaaggaagcagaatgaggcctgaacagagtgggcagtaggaaatgcagtcatagagaaagcagggctgggtcacaggcctcagagactgtagaacattggctcctactctaagacaggaagctgctgtgagcattgaggttgggcgtggaaccatttgactttttatgaggatcactctggctgcagtgtggaaaatagactggacgagggagggcagttaggaagatgtcacggtaactcaggaaagcaataccggtgctttggacgagggtggtggcagaagagaaagtgagaagtattctggatatatttcagaagaaagtggataggattttctgatgggtgatatgtagagtgtaggagaaagagaagaagcaagattgactttaatgttttccacctgggcaattggtggactggaattgccacttgcagaagtgtggaggtatggaaggtatgggaagagcagattgccaggaaagttgagttagttttgaactcattgtgtttgagaggtctgttaaattatcaagtagtgatgttgaggtgtaattggaaaagtcaacctggaatttatggcagaagttgaggctgcagatataaacttgtaattttaaaaatgtatatttaaagccatgggagtgaatgagttcatttgagattgaatgcagattgagaagagatttagaattgaactccagggcactgcatagcaggaggaaaacctagtaaaagtggtatctgtaaaatagaggaacgaactgtcacaatttgcctggtactgaggattttctcagtacatgagactttaagagactgggacaccctgagacaattggttgccttccatgggaagaaagtatgtcaagagggagagagtgaacaactgtgtccaataaaccaggactgagcaaaaaccattgaatttggcatcatgaagtcttaggtgactttgacaaggcttgtctgttgtgaacagccaagtaaatgtgaggaccactctccaaaaggtaaagaaacatgcatgaggatacaggtgcgccagctggagacatcatgcctcttccccgtccccaccaggagtggcgtgaagcctccccagtgctgtaacgaggcagccaggtcctgtgtgactgcacatgtgacttggggcaagtcatttaacctctctgttttcactatcctatttgtgaaatattgtttagatttgtggtttgagtcagctatctgtatactacactgtgttaggagctatgtagattaattttcaacagatatggttctggggttgtaggaattttcaatttgagaacaaattgaatcttaccctttgtcaggagaaatagcctttgacatgtgttaggggcaagggaaatctcaaacttgcttaattttaaaaatgaatatttggttgtggataatttaagctttggtgatatttctaattattttttgtgtgtttctagtctactgaccagaagtctgaaaaaaacaactaaaaagaaagactgcataagccttcactagagaagtattgaaaattgcttgagggaagtgacggtttctttagcctagtgtctgtaggaccccagtgtagtgtttgttgaatgaatgaaaggaggcgtatcagtcaggttcactcagagaaacagaagctgtaggaaatccatatggatgtgtgtgaaggtattggcttgcctactgctggtgtgtggctaagcgagcttaaaagtccgcagggcagatagtcaggaaggaaatattcccaacagactgagctcccttgggcacaagctgaagcctggagtctgaactgccagagagcctctaccttcttagaaaaggcttcccactggctaagtcaggcccacccaggggaatctctcctttgattaacttaaagtcacctgtttagggactttaattacattggcaatagtcccttcacagaagcacctaaatgactgatgatgtaactgaaaaaatgtgtgtgtatgctacaaaatggctgcagtctcccttctgtcctccagctcttgcaggagaactctcttgtagctcaccctgtctgaaaacatactggaaaggaattcaaggaaatgtagttcagcctagccacgttgacacatcatgaagccgtcacaaaaggtaaagcctggtttaggagcatttgcatttgcagtcttaagtatttttgtcttatttttcaaaaggggttgggcacggtggctcacgcctgtaatcccaatactttgggaggccgaggtgagtagatcacttgaggccaggagtttgagaccagccaggccaacgtagtggaaccccgtctccactaaaatgacaacaattagccaggcgtggtggcgcatgcctgtaatcccagctattcaggaggctgaggcacaagaatttcttgaacccaggaggtggaggttgcagtgagccgagatcccgccactgcagtccagcaacggagtgagactctgtctcaaaaaaaaaaaaagtagttttggtttttaatttttgattttttcttatgttattacatataacgaatgatatgcatactctgaaaaatcatgacataaaggtgaccttgaaattactttgatgttcatttaaactagtctttggtctccactggctaggagaccacatatagcagaacagcagagaaagcaaaacagttaattttcatgtttggcttttgagcttccagggacccaagtcttgccttgaaccgatcttaggaaattcctcattccctacccgaccctgtttctaaactgcatccctgctgaaatgcaatgccactgtaactctctccaatatttgttttcttctttggcttaccactagatgtatgtatatatgtttgtgtgcctgtgtgtgtgtgtgtgtgtgtgtgttgactgcctcatagtaaagcctactcttgagattaagactcctgatagtttagagaacagaaatcttttttagttcctggttattacttgaatttgcaagaggaacaactgctaggaggcctagttaacagtagttagggtctccacccacttgccaagggcaagactagtttacaccacatttggaatgaccagtttcctcccactttagtttcagtgtagaaagagtaggggagacgaactattcaatgtcagcttgggtgtagtgccagaaccgtactcagtaatgctgtcattgctgttggtgcttaccagctcttcagtactggaatagcttcagacctcgagagtttatgactttatcatcaactgggtgtgttgcccttggcacattgccacacagtgcttaatgatgatatatgttctttatcaaattccccccaccaaataatggcattatttacgtgtgagaaagttgcacatttcaccacctcatggtttattagagtgcaattccgtgagaacaactgcctgtgatcctctgtatccccagtggccaactcaggagctcagtatgccctacccagtagatgctcagaacatcattgctgagtgaggaagtcagccatcattttctccctggatagtctctcctgtagataacaggggccgttatcagccaggtttttcatcatttgtggctttgaatttcagggacatgacaagtttgctttttgtttcgttttgttttttttttttttttggttttctagagacagggtcttcctgtcactcaggctggagtgcagtgatgtgatcacagctcactgcagcctcgaactcctgggctcagtgtttctcccatctcagcctttggagtagccagcagtataggtggtgtaccaccacacccatctaactttaaaaaaaaaaaaattgtaaagacagagtctcacttttttgcccaggctggtctcatactcctggctcaagcaatcctcctgcgttggcctcccgaagtgctgggactgcaggtgtgagccaccttgcctatccaacatgacaagtattattctctggcaggaagtgaaattttttctcactgatgattgcacacaaatgtcatatctccatgaggcttctactcactagttttacggctcatgtcaccttgcttcaaactatgcttcagtataattttgaagtgtatatttccattgcctctccttgagtaattgatattcttcacaataagtttacatttattatcacttttatttacttactattattactctgagcagccaatcttatgagaagctcagagtggaacgtgtgggtcctggtaaatatattatttgactcacttccaaacacacttaatattgcctggtgttttgattatttcaaaatatacagatttcttgaaaggcctgcaaaaggaaacaatcaaaattatagcggttaagaatgtgagtctgccttggtttgaattccagatgggccagtccctagctgtgtaatcatgggaaaattattaaatctctagcctcgctttcttcatctgtaaaatgagcatacaggctgagcatccctagtccgaaaatgcaaaattcaaaatgctccaaaatctgaaactttttttgtgcctccatgacgccacaagtggaaaattccacacctgacctcacgtgataggtcacagtcaaaacattgtttcatacacacaatacttttttttatttgtataagtttaagtggtacaagtgcagttttgctacatgaatatactgcatagtggtaaagtctggacttttagtgtctccatcacccaaatagcatccattgtattcattcaggaatctagcatccctcaccccctcccatcttcccacctctccaagcctttcatgtctagcattctgtgtccatgtgtacacattatttagctcccacttctaaatgaaaacatgtgatatctgtctttctgtttctgagttttttcacttaagataatggcctccagttccatccacgttgctgcaagagacatgatttcattctttgttatgactgaatagaattattcaggcacaaaattattaaaaatattgtttaaaattaccttcaggctatgtgtataaggtgtatatgaaacataaatgaatttaatgtttacatttgggttccatcccgtggatgtctcattttgtatatgtaaatatgacatgatatgaaaaattcaaaactctgaaacaccaattgaactcaatttgcagtaagaatgcatacctcacagggttatagtgaggattgaatgagacaatcctagtccaatttctttgcacatagtaatgctcaataattattacttaaatgggtataaactttatagtaatgaggttggggctggaaaaaatgcagtttcataatttcctatagaagtcattcaatcctgactctaaactctgtattccatgtggtggttgggtggcgtgggagagtcctctttatcctgtggggttggtcctatggaggtgtctgtggcagattggcagatgcatttgtcttgtgcatagatggtgtctgttgtttcctctggcagagttcaccagtgtcctaatgcaaacttagtcctcatctggctcctgcacaggctgatctctggctcctttagcccctcatggttcctgttgtttcattttcagagggacccttgtaaggactatagtcctctcttcagctgaccttcaggtccccagtcagaaccaagggaaccgactctgtcccttctcatagcacctgaaaaccccgggaaacgaggggaatgctttgctctcagctactgaggttgtcctgtcaccttctcttctgccctcctttgccatggcataggataatgtaagtcagcaatctcattactcggtatatagccagaggaatataaatcattctaccataaagacacacgcgtgtgaatgtttattgcaacactattcacaatagcaaagacatggaatcaacttaaatgcccatcaatgacagattggatgcagaaaatgtggtacatatacaccatggaatactatgcagccataaaaataatgagatcatgccttttgtgggaacatggatggaactggaggctattatcctttgcaaactaacgcagaaatagaaaaccaaatgctgcatgttctcacttataagtgggagctaaatgatgagaacttaccaacacaaagaaaagaacaacagacactgtggcctacttgtgggtgaagggtggtaagagggagaggagcagaaaagataactatgtggtcctgggcttaatacctgggtgataaaataattgtacaacaaacccccatgacatgactttagctatgtaacaaaccttcacatgtacccccaaacctaaaagttaaaaaaaaaatcccagacaggaagtagggcatattttgcctaatttgcagcttcatcctcactccctaacttacgccactcatgtctcctccatcatcagggacagcaagagtggggaggggacgaggcctgccacatctccattctctgatcttatttcctcttgcctcttcaacagcgctttgtctctcctctccagcttgaagcccttactctggtatgtgatttcaaagcgatgaaaaactggtttcgttagtacttcccttggatctgcccttgtctcccatcaaggcagtgcaagtaaagaatccaagatatttgttttgttggtccactggagggtagagatagagaaaaacagtaacttccccaccacccccaacctcccttgggctgatgactccaaagactgccataaatgaacacttcatagagctgctattaatatgacacaaatctacttgatctaagggattcttttactttcttagggtggtcattcctaagtctttggatttcacagaaaagaaaatatattttaattgaggactgacaaaggttgccaactttttatcaattataagaattgtttttataattaccatcaatttctattatttcttttactccccctctttccaactgtggaaggtaaaattgaagagcaaagaacacttatttcaaagtgagtaaatttagctatatgaaaactcagcagattgccctgagtttccttgcgtagctgcagtccagtggaaatttcttccagaccagcaccagtcgccccagtgacatttagaaatcactgccctggattgtttcagccaccgaaacactcggtgttcactgtcagctatgattatatatgaagtgctttcgagaaccaatgtatagcataacttaggccaaaagaaacactgtgcctaaacactcagccaaggagtgttgagtttgcctggatttctggaaaattgtctccgttccctagttcactgtatttgggtaaacaaaacatggcctcggagagcctttgcgggagaaattataaaaattcagcaaagctttgtgatctcattttggatctcctcaggattcctcatcaagttgcaattaaggagagaaaaattccgccttggggtgggattttaattactcatcatgttatgacttgactttctgtgctgcatttttttccatatcactacttctgtgtttgacagctcctccaaagagtcgctccgttttatgccaggagcgaagtacttactaagtcaaaggaaagcaaggcaaacatctactattgcctttgtgcttttaccagaaaactgggtgagaacctccttttccttttccctgcccctccagcctcagttttatgaccctgtggagccagtggactttgaaggacttctgatgacacacctgaacagcctggatgtgcagcttgcccaggagctcggggacttcactgatgacgacttggacgtggtgttcacgccaaaggaatgtaggactttgcagccctctttgccggaggaagggtaaatagttttctaaaatgtagatgtgattgggattgtcatgattgttttcaataagtgggtaggggagatgccttcaatctgaacttaaaaataaaataaaattactcaatccattcaaatgtgtgggacagctatatgatatcatcatgtaagtatagatagtttttaaattagtttggccagagattttgaaaagctatgtgaagactaagccagtgcaagggatgcaggaggaccaaatgaaatgctcaagaggaggttaaaagtgcaggctctggagccagaccacctggctgccagctcagtgaccttggctgtcacatgacctcccaaatcctcggtttctccatttgtaaaaatgtcaagatttttaataataattactgaaatgccaccatccagaagcattttaattgcttacagttatgagactggatcaagttagaaacataaggtaaacccacatttattgagcatctactatgttctgggtactgagataaaaagatgaataagtcaaagtccctcctttaaagaaagtgtcatgcagtgctaaaacagtggggagagctctgtagaataaatatgtgaatagctaattagggcttgagtttctatagttggctcttctatatgtttataggcttgggcattagtttttggcatcaaactaactgtggaattgtagctaaatgaaacgcctgttgcttctaaaatgtaaaaaaaaatgtctctttggaggtttaggataaacttttatttacatttattttaaaagccaaattaagattcatatcctcctggacaggttccatcttctcatcttccccagaaggtcccagaaagaagatcctgacacacagcccctgccctctttactctgagatattctagttctattttggattttatttcatcacagtttaaggaggttggatgataatgggctggtattattgtgaaccgttgctctcttgttcagacagtcctcactcacataggagaactgaccatatgtgtagctctgatgttttaaaaatacacacttcccaggaaagaaaaacattgtcatttttgggaaacatactcccccattttcagtccatttattcaggtatgactttagtataagttaacacctactatttcatctttagtgaagaatcatttaatttattcctttatgtaaaatttatggatgtttccaaatatggtcagaatcttggaaaaagctgtttaaaatgcttacagtagccagtcaccgcagcttgttcctgtggtcccagctacttgggaggctgaggcaagaggatcacttgagcccaggaatttgagttcagcctgggtaaaatagtgagaccctgtttcttacaaaacaaaaacaaaaaacagtacaatgaatttagaggaaggaggaggtttttttttttttgaaatttgataaggaagataatttctttacttagcatcagttttttagtatactgttgccttgtcaaaagaatttataggtaacatacctgtctgatgtctttaagacagcctctactatttcagttgttgccaaaaagtcttctgtataattaaggcaggggaaggtatcatcatcacaccagagtaaacaatagctgactcctgttgaacaacctgtgcctagcccagaactttatgttgagctgtgatggcgtggtagtgaaaaacatgaacgctacaggtgagctgcctggattcaggtccctgctccaccacttgctgtgtgacttggaacaagatccttaccatctcatttttctgcaaagtgagaataatagtaatgcctgccctatggtgctgattgagaattaactgaattaatacatataaagtgattgcctcagtgcataatgcacagtaaatgctacctaagtgtaaactattaatatcatatatgcgtcttattgtgtgccaggcagtcttctaagcactttgcacactaaccgatttaatcttcatcaaagctgtctactaaaaggggcactcttactactctaacagctttaaggagaggaaactgaggcacagaagggttgagtgactggcttatggtcacatagctataagcgatgaagctgggatttgggcaattagggcccagagactgcatgtgtaacctttacaatattttatctaatactaacagcatgtctctgttcttacctccttatcacagatgagaaaattaaggcttgtagcatttaagcctgtttatttctggtactaatgcatttgcaacaatagcaaaaagctttgctacaattgttatttttgatttcaagactctgaagcacttgaagagtattgctcatggtgcattccttaagtagacatgacaggaaccaactgaattaatgatcaccaacaaaagccagtgtttgcaatttcatcaaagcataagacaactgttctttttcctggctttcaaaaaggagaacacgcgtgtcctaacaaggttacacatgcataaaaaatatgtccaaattaccctgtcagagataggtatttatacttattttccttgttttgtattcgaatacagctagttctacctgtcttgtgtctgaatgccttcggggatagttataatttaacatgattctgtataataaagaaaacccacaaagcaaaaaaatgccaacatgtttgtctcatcaaagtaaaaatgtttattgccccaggaatacttcagacatttggaatgattgggcaagaacatcctaagcattctcactgataaggatttaaattcgtgtcatgttccttgctcatgattaggggttgttttgttgttttacccagtaataacgtgtttatttcattttctacctcattagggttgaactggaccctcatgtcagggactgtgttcagacctacatccgtgagtggctaatcgtgaaccggaagtaagttactttttttccactttttgtatataaatattaattttatattgctagtttttaaatatttcttaatactttgaacagttctaggtttacagaaaaattgcatggcaaatagagttctcatgtatgccttccttatccccactccatatcacacacacagttccccctattatgaacatctcactttagtgtggtacatttgttacagtagctgagccaatatggatatgttgttattaactaaagaccatagtttacattaatgtttactttttgtgttgtatattctatgggttttgacaaatgtgtaatgacatgtatatgcctttacagtatcatacagaattgtttcactgccctaaaaatcctctgtgttccacctgttcatcctccctccctggcaaccactttccttttttactgtctccataattccaccttgttcttcaatgtctttttgtggcttgatagctcattttttttattgctgaataatctttcattgcatggctgtaccattgtttatttatccattaacttactgagaaagaaagttctattttaaacataaagaatagactgcaagcttgcccaacccctagcccgtgggcaacatggagcccaggatggctttgaatgtggcccaacacaaattcataaactttcttaaaacattatgaggtttttttttttgcgatttttttaaagctcattagctattgttagtgttagtgtatttgatatttggcctgagataattcttcttccagtatggcccagggaagccaaaagtttgggcacctggaatagagcctttttgttgtcttctaattctgatgaattcccagggggaaaaattaagtgaattgaaacctggcctcagcttcagaggtggcattcgagtttatgaccaagaaataaattacttgctggccttccagtaagggatctttctctcctggattaatcaaaccttctgtgacattgttctgagctttttctctccatgccatggacctggacagcactctctcatgagaaacatctatgcacattgaaattctcagcctgcatgggtgtacctgttggggagtgagatgtggactctctacagattagggcacaccccactagagacacgtcacagaacctttgacaagacattagtagtttaaaattctgatagcctcactcctcctatacctcagtaagaattactattctatggggtaaatgatgaaagactttgaggattgggttttatctagctcctggaagggtgccattgagtttgtgctgaggttttctggagtaatgtcaatatgcacacattttcagcagcagaaaaagagaaagcattcattattaaaagttattaagagaaagttagatgccaatccatcatctgttctaaaatgaatggaaaacaaagtttgctgggcagtcagataaaattatggtttgctgataataaataaaagatttcagaacaagttgttctcaagtttttaaatgctatcattagaggtactttctggacattaaagatctaaaaaaaatctgagaaggaacaaatagaaagatccattttgatacatttggttttcagatttattttctatttcgggcttgtccactttttcatttctcatggcaatgcacgcttcttggagtagtgatttttcttgatcttgcacaaatgtaagagaaaaaaatgactctttttggaatactcgttgaaattttagaaataattatgaaacacaaatcactcagtttcactctagacagataatcatcatgaacatttgatgtctgtcctttgaatagtgttgggtttttttggtatatatttgcgtgaaaactaaataagattataatatcatttttgtaacatgcattttcagttttcacagtaaagagtgattctcttcctttgctattaaatatgcttcctcaatacaatgattgatgattgcataatatatttataccaaaatttatttaaccaattttaatatttaggtgattccttccttttcagtgttgtgcttaaaatgcaaaaacatccttctcaggaaaaatttgtacatatttatgatttttttctttggaattaattcctacaagaggaatttctatgtcaaaggatatgcacaaatttaaagatttggaatactagatcaaacattatgccgggcgcagtggctcacatttataatcttactcagcactttgggaggttgaggtaggaggatcccttgaacccaggagttcaagaccagcctaggcaatatacagagaccccacctctaaaaaaattttttaaaaaattaactggatatgatgacatgcacctgtagtcctagctactcgggaggctgaggcaggaggatcacttgagcccaggaggtcaaggctgtagtgagtgacgattgcaccactgcacaccagcccaggcaacagaggaagaccctatctcaaaaaaaaaaaaaaaaaaaaagccaggcacggtgctcatgcctgtaatcccagcactttgggaggccaagacgggtggatcacctgaggttgggagtttgagaccagcctgaccaacatggagaaacccagtctctactaaaaatacaaaattaaccgggcatggtggtgcatgtctgtaatcccagctacttgggaggctgaggcaggagaatcacttgatcctctaaaaatagctaaactgggaggcagaggttgtggtgagccaagatcgcgccattgcactccagcctgggcaacaagagtgaaactccgtctcaaaaaaaaaaaaaaaaaaaaaaaaaagattattgacactacatgcatgaatcctcaagaatattagatgttataatttatcaacatttccaattttatttgataaaaggttgtcttttttttcattttcttttactattagattaggcatctttcttctatatatttcttggccattttttatttttcctggtgctctgcttattcgtgaaatttgtgcatccctattaatgtatttgtctagtctgatttatttttataagcacttttttggtaaagatattaagccttgtctaccatgtattaaaaatgtcttccccagtatgccttttgtcttttaaagttgtttttaattttcaacattcagaattatttatgtcattaaatctatattaatatttttccttatgtttaattttggcatcatgcttaaaatttgattcacaaacttattattattttctaagagtatgggattaaagcattaatccagatcattagccacttgactgttgcttctgttcccttatgtgtctccatttgtttttatcttttctacagaagcaatggttacccatatatttattatatgcaagtttttgcatcttgttcccctaaaaaagaaaggaatatgtgttttaattttatgtttggcaacattctagggatgggattaccattggcccagttctctgcacccctgtgtaatggagcagttcccttcttaacggtcacctagtggacagggagaagtgtacaacttcagaactcattgtcagtttctggcaagctttcttgtagaaaagttgcatctctttctatccctctgcctcattctcttgcactctgaatctaacactctgcccatgaaaactaaaattcctagcacacactcctcccagggatcattctgtctctatatgcacctgtcgtattttatctgtggggagaatccagtacactattgccagatgtccttcatctcccaacctcacacagtacatttttagcttattgttttctgtgagttgtatctgtattgttttagaatgatggtagaaggagaaggacaaggagaaggtggtgattcatataaatgaaaccagctggaagctgtgatgctttcatagataagccactattatgaagaaggagacttcagatttctgtatagacactgaccagggactcgtgggcaggaaggtgtgcaacaccttcttatctttattcagtgagttcccctttggggagacaaagtttggtacatccttctctttccagctccatctgatccacagaggttctgtccagattcaggcattaagttatctcttcatttggatgagtttccagtttttctgtgtcttcataagtggtttactagaaagtcggaggaggatgcaataggggttgctggccatttgttaattagtgattaattatttagctctcctttaattggttatgtgccaaatcatgtatgattgttttgaaagaaatcaagtaatatggaggtgcattaaggaaaaggcaaatctcatgcctcactacttaccagtgtcctacccttcccttaactcactcttcactgcgtaaagcccagctgtgtagcttccagatcttttcataccctcacaaaaaatatttgtctatttatatttttcacataaagatatatgtattaatgtatgtacttatatattacaaacatttctttaaaataactgtccatgtcagagctatatcccattctactgaaatgctgcctagtattcaaagggtgaaggaatgtgtcctaagttactgaaactaaatgaccattttggttgtcaccatttttcataattgcaaataatactgaaacaaacatatctgcacatttgccccatacatgtgtgtgaatatttctgagggtagaaatgaagccagtgtacatggtatgctctgataggtactgccaaattcttctccagaaaagtcgtgctgtttcattccattaccaactgggcattaaactggcgtgttcccatattcttgccagtgctggatattatttattaaaataaaatttcagttcctccagtcttcttttagttattattttaatctggaagctattacacctactttctgaatacagtttcctatcaccaagtttcctttccttatgtgttctaaaatcccagttaaatatgcacttaaccatacaaccgtaagtcccactcttgagtatttacataaaacctatgtgcaaatacagcagtttagcagttttatttgtaattgccaagactgcatagcagttttatttgtaattgccaaaaactggaagaaaacccagattgtactcagttgggtagtagataaacaaactctggtaaatccatacaatggaatactactcagcagtgaaatggaacaaacaattgatatatacaacaacatggatgaatctcagatacagtatgctaagtgaaagaagccagacaaaggccgggcatggtggctcatgcctgtaatcccagcactttgggaggctgaggcaggtggatcacttgaggtcaggagttccagaccagcctgaccaacatggtgaaaccccgtctctactaaaactacaaaaattagctgggcgtggtggcacgtgcctgtagtcccagttactcaggaggctgaggcaggagaatcgcttgaacctgggaggcggaggttgcagtgagctgagatcatgccattgtactccagcctgggcaacaaagtgagattctgtcttaaaaaaaaaaaaagaagaagaacccagacaaaaaagataactgcatgattccatgtatctgacattctggaaaagatgaagctacagggatggaaaacaggtccatggttcccagggtctgggagtggggaagagggctgactacaaaaggacacgggagtgccctttgcgtggtgctgggactgtagtgcccatgatgtaaaatctgccttggaccattacattagaagaaatcaattccagttatcccaatattccctccaagtgaaatactttggtagcatatataataataattcaataagtattagctattatatttattaagtagtacctatcagaaaacatacttatattagcatgtcaaaggaatgaacacaaaattctctcccatatattgaacgcaccatggaggggggacctgccttcctctggaggaccatacttagtgaagccactttgccttataaggacatgcctttgttatccagaaccaagcagtcaaacactgatttagttagctcctttatttctcagttatctcctgctgatattacatttctccataatatctagagataggcttttatgtccttgctagctgtggtaatggttttgaatcccacttagggggcagaggagtagagtaatggccacttgtgttccctcccaccctcatcattctacagggcatttgccactcaagtactgtaattgagacatttaaatcatacaaataatgctgcccatgaaggatagaggaaatttttagatttccttttaaacctaacagagaaagattaagttacataaaaatgtaaaatacatgatctccagtacattgaaggaaatgtattttcttacttgaaatgtttgtgttacttagactggaagatttattaaatgatttccattctatcactcatgtttacagcaccaaatttggtgtccttgttctaaaaacaatagtacttttctccccatgacttttgaaaatgattactggtttactgattagcatggcgccatgtttgcttgtttgtccaaccttttatctgcatattttgataatgttgtgtggattaatatttgatgacatcctttgggtgatattaacgattttaagctttatttcttctgtcattttctctaaatgaaccaaagagggataaacttcagaatgtttttgatgcctggtggagagctgaactcttaagaaattaaacttgtttacatactatatttattcttgccgcagagacagtgaaacatttcatgagtgttatgggcagcatcataaaagcctttagactttgtttttcatctggggtgattaaggtaattctgaaggaaggttgagctcaaggagagctgagatatcaaggaatggggtatcatctgttttattactccatattttactcccagtgaagtggtaaacaattaaaattcaaacacatcagtgcatataattcagttactcccagaacaccataaaaatgtttccctgatcaataattgcttattatgacatgcatttgttgtgctagctgtcaaggtgcttagctatttgctttctaaaagtatgaaaagcacgcccggctcatcagcctatgtggtaacaaagagcaatccagctgtggatgtcacagagccactcttgacctgttgtgcatagactccctccccacaaatccaaacccactaagactctccaggctctgttaacacacaccagcctggttcagcttggatgccctcctcacaccatgtgggttctgattttccatgccaggcagtccatcttaaatggatgcatcctcaccgtgtttgggcttcaacttcctattctggacctcctcggctactccctaccccaaggcatggagggctgccttgttctgatgcaccttatgattttagcaccaaattgtacaggaagggagagaagggaaaggagaaagaagatgtgaaaggaaagagagggtagggaagaggaaaaagaagatgaggaacacgtattattttctaatcctcacaataggtcctcaaaatgagcaacatttccccctatttcatacttgaggaagctgtgactcagagagactaaggcacttgcccaaggtctcttagtacattaaggagccagcgtctgcacccagttccttctgactctagagcctggattctgctggctgcaccacactgtctttaaagagaacactctcaaaacgcgcttggtctttggattgtctcaaatgtgttagaatagtgttttaagaaaaggaatgcagatctcctgggaagcaataggtcgagttcatttcatgagaatcatttttctagccattggcctacttccccatttttctcctgtctgcatctaggtgcaacaggaacttggctttatttgactccattgccagggtggggtaatgaagctgggactctcttgtagccagcggcagtgagccagcagtctcactgcctacccagtgatggttccttctgtggccagcacttctggaatgagtcatctttacatgtttgccaacccttgtcctctcctccccagccaggttcacccttgctgctgtcaaggagctttgagactttctgagatttttaaatggggaagtagatgttaaacctagtatgaggaagagagggaaagtttgctctggtttcaaacacacagtcatagaagatgctagtcttaatgctttccatagcaaaaaccctgaaggcttagagtgtacacattgtgaactgaacttttaacattattgtgtaactcatttgttaatgcctatttgtcattgactgtggggtccatgtgaaaaactcccacaaacactctaacaaaatggaagacagaaaagaaagcaagcatcatttgtgtacaatagccaaagaacaatagccaaataaatttgatggtctcaaaagttaagcatcttttgaagagaaaatttgattttagggccaggtggggtagctcatgcctgtaatcgcagcactttgggaggcagaggcgggtggatcacctgaggtcaggagttcgagaccagcctggccaacacggcaaaaccccgtctctactaaaaatacaaaaattagctgggtacggtggcgcatgcctgtgatcccagctacttaagaggctgagacaggagaattgcttcaactcgggaggcggaggttgcagtgagccaagatcatgccgctgtactccagcctgggtgaaggagccagactctgtctccaaaaacaaaaacaaacagaaaaaagaattgattttgattttttcagatacagtgcatgaactttttatcataaaatattaaagctggggaaaatatcttagaattcacctcatgttcatgctttaccctgtgaagaaacagaggcacagagagaaataacttgaggataatggaaacaagcacacatctgtaagtgtgtgtgtgtgtgtgtgtgtgtgtgtgtgtgtgtcagagagagagagagagatgttcctttgtaagtaaacactcttggaaatagccgcattttattataacacaaaaagtaatgctaaagctgatatagttctggttgctaagcttcacacacaaaaggtctttaggtagctgcttcctaatttttatttctgtggcccaaaagtctccttgtaaaccttcgtgtcatgtcatactaaacctttgacatcaataccctttaaaatgtacaagtccttaaaaaaaaaaaaaaggcaaagggcaaatactaatgtgggaaatttgaattttaattaactgtttgtttcaatgttaggataaattaatgttagataaattctttggtaatttttccccctaaaattggatttttcaagaaacatcactggttcagtatattgttatttggggtagcataattttaggcgataacttaatatttgcatatatttgtcactactttgagttggtttttgtcccctgacccccagccaggatgttagatcacacagatttttttttctttgagcccttagggagagtccaaaacagtcacttcatgtactaggaaagtttacccagtcagcacacacagatatgttgttgcctacatttatatttgtgagagtgactgttaagaaactagcaggtttataaaatccgtgtgagaatttctctcaaataactgttaatggacaatccagcaatcctcccatctcaggctcccaagtagctgagactacaggcaggtggcaccatactcggctaattttttgtgttttttgtagagatgcggtttcaccatgtcacccaggctggtctcaaactcctgggctcaagtggtgctcccgccttggcctcccagagtgctgggattacaggtgtgagccactgcacccagcctgtacattttccttgaaatcgtttttggatgtttagtcttatttccttattcagagttcacctgtttattttttttttcatttccccaatttagcctgcgtttcacccagccctagcaatataggtttgggtcagagaaattcaagcggccaggggatgctgaagatggcccattatggccgggcgcggtggcacacatctgtaatcccagcactttgggaggccgaggcaggcagatcacaaggtcaggagatcgagaccatcctggctaacacagtgaaaccccgtctctactaaaaatacaaaaaaattagctggctgtggtggtgggcgcctgtagtccaagctactcaggagactgaggcaggagaatggtgtgaacccgggaggcagagcttgcagtgagcagagatcgtgccactgcactccagcctgggcgacagtgagactccgtctcaaaaaaaaaaaaaaaagatggcccattgtggtaagccttgacttgaattagtcaccaagctagtcttatctcttttctaggctaattcttgttttttgtttggctcaaaacaaattgtttgtcttcagaacacaataaaatccagggagagtgtcctgttcttcctacagacgtcactgggacatcttattctttaattaattcagtcaactaaaattggtcaaatacctgctctctgtgccagagttataaactttgtatttgtataattgctagtagctctcttacatttcttactttatctatctggcatttgatctacctaataccttccaatatcacctcatgtccctttaccagcttggtggtttttctatagttcaggaaatcaaacaaaatggtgtgtgacctggaggtactagaaaaacaatagcaaaccaactccaaagccagcagaagaaaacaaataaccaaaatcagagctgaaaaaaattaaaacgtgaaaatccatacaaaagatcaatgaaaccaaaagtttgtgattcaaaaaaaaaacaaggttgatagatcactaactagattaataaagaaaacaagagagaagatcgatccaaataagcacaatcagaaatgacaaaaatgacactacaactgatgcctcagaaatataaaaaatcctcagagactgttataaatacccctatgcacacaaactagaaaacgtagaagaaatggatagattcctggaaacacacaagccccctaaaattgaagcaggaagaaattgaaatcttgaacagaccaatagtgagttctgaaattgaatcagtaatacaaaacccaccccaaaaagcccttaatcagatggattcacagccaaattataccagatatacaaagaagagctagtaccaatcctactgaaattatttcaaaaattcaaggaggaaggactcctctctaactcattctgcaaagccagcatcattctgataccaaaacctgggagagacacagcagaaaagaaaacttcaggccaatatccctgatgaacatcgacacaaaaatcctcaacaaaatactacaaaccaaatccagcagcacattgaaaagttaattcatcacaatcaagtaggctttattcctgggatgcgaggttggttcaccatacacaaatcaataaatgagactcatcacatagacagaattaaaaacaaaaaccacaggataatctcaatagacacagaaaaggcttttaacaaaattcaacatcccttcatgttaaaaaccctcaacaaattaggcattgaaagaacatacctcaaaataataagagccatctattattcaactatccacagccaacatcatactgagtgggcaaaagctggaagcgttcctcttgagaactggaacaaaacaaggatgcctactctcaccacttatatcaacatggtactggaagtgctagccagagaaatcaggcaagaaaaagaaataaaagacatcccaacaggaagagaggaagtcaaactagctctgtcacagtgcaggcaatataattctgtacccagaaaacactgcagaccctgctaaaaggctcctagaactgataaacaacttcagtaaagtttcaggatacaaaatcaatgtacaaaagtcaataacatttccacacaccaataatgtctaagttgagggccaaatcaagaatgcaattccatttattttatccttttgaataaaatacctaggaatacagctaatcaaggaggtgaaagatctctacaatgagaattatgaaacacactgaaagagatcagaggtgatacaaacaaatggacaaatattccatgctcgtggataggaagaatcaatattattaaaacagccatagtgcccaaagagatttttagattcactgctattcctatcttaattagcaacatcattttttcacagaatttaaaaaaaaaaacctattccaaaattcatgtggaaccaaaaaacctgaatagccaaagcaatcttaagcaaaaagaacaaagccggtggcatcacactgtgtgacttcatactacactacaaggctacagtgaccaatacagcacagtccaggtacaaaaacagacacgtagaccaatagaacaagataaagaaccagaaataaagctgcacgcctacagccatctgatctttgacgaagttgacaataacaagccatgaggaaaggtctccctattcaataaatggtgctggagcaactggctagtcatatacagaatattgaaattggacccctccttttaatcatatacaaacattaactcaagatggattaaggacttaaatgtaagacctaagattacaaaaaccctagagaaaaaaactgggaaatactattctggccattggccttggtaaagaatttatgaataagtccccaaaagcaatggtaacaaaaacaaaaattgacaagtgggacttaattaaactaaagagcttctgcacagcagaagaaactatcaacagagtaaactgataaccaactgaataggagaaaatatttgcaaaccgtaaatctgaagaatgtctgatatccagaatctataaggaacttagataattcaacatgcaaaaaaccaccccatttaaaaatgggcaaaggacatgaacagatacttctcaaaagaagacatacatgtggccaaaaaatatatgaaaaaatgcttaacatcactaatcattagataaatacaaatcaaaaccacagtgtgataccaactcacaacagtcagaatgcctgttattgaaaagtcataaaatagactgggcatgtggcttatgcttgtaatcccagcattttgggaggctgaggcaggaggattatttgaagccaggaggttgagaccagcctgtgcaatgtagcaagactgtgtctctacaaaacatcaaaataaatggaaaaaaaaaaagaaaaagaaaaagaaaattaactgggtatggtggcgtgtacctatactctcacctactgggaggctgaggtgggaagattgcttgagcctaggaattcaaggctgcagtgagctataatcacaccactgcactccatcctgggtagcagaacgagaccctgtctcaagaaaaaaaaaaaggcaaaaattaacatgttggaaattagttcagtcactatggaatgcagtgtgaagatttctgaaagaacttaaaacagaactaccattcaacccagcaatcccactactgggtctatacccaaaggaaaataaattgttctacaaaaacgacacatgcactcgtatgttcctcacagcacaattcacaatagcaaagacatggaatcaacctagatgcccatcgacagtggactagataaagaaaatttggtacatatacaccatgaaataccacacagccataacaaagaacaaaatcatgggggtttttttgcagcaacatggatgcagctggaggccattatcctaaacaaattaacacaggaacagaaaaccaaataccacatgttcttatttataagcaggagctaaacatcgggtaaacatgggcataaagataacacggtagacaccagggattactaaagaagggaggatggaagcaggtgtgggttgaaaaactgcctattgagtaccatggtcactatgtgggtgacgtcagtatcatgcatacatcaaacctaagtgacatgcaatttacccatgtaatgaatttgcacatgtatcccttgaacctaaaataaaagttggaaaaaaataaaagataagatatcccgtatcctcaataaaaataaaagtggcgtgtttgtgcacttgactttgtaacatgttttccaaagatgtctttgagtcataaaaatgggaaatacacatgttggtttctctagtcatcacttgacaacttacatgttttacctttcttatgatggtctgtctcatttcttcagtgacagggctagacattctgttttaaactcttcccacagctgtatattattcaacacaactttaacagagttcatagagtggagattgaggatgtttgcaaagttaaatcatttatttttattttttcttaaccatgtcccgcctgctttattcattattaagaacattgatgtgaagattaaatggttttctctatttttatcttcaaacgatctctatttgtggcttctgcacattgctagatttattccagccacttacactagggtcatagtttagcttcagctcggagccaaatgccccacagctgaaatgaccgcacctctgaagtggcattttcccaggccatgcctccctttaataatgagccagccagggggtaaatttgtatctcattacaacagagccttgtattaggcctggagaataattaaatgtgaggaattataattggttccctctttgaaagctctctcagcaccatgtctacacttaagccattacttttatttttaatctaatggtttgccgctctctctccctctttctctctccaaattaaatatcaaccataaaagaaaccaaggaagtccagaaatctgtggctttaaaaagactggatctcgaaaagattttcacaagacgcttccgaaacagacgtttgagtcggaaaccttggagtgcagtgaacccgctgctcaggtatttcctgtcaacaaacatggttaccaggttactgggctcttctgcccagggcatgctgtcagttttacaaactagaataaacgatagacgcatagaaagtttgagtaggaggaactttaccatctgagtcagtgattttttttttcaaacttatttgtagctgtagaaattggtgttcaaatgaaaacccagaaacccaatgattaaaatagaaaaaagtggaaaagctctaactgggggacagagacaccttgggcccatccctacgacagttcctgcagagactcttggtgcccctaaggcaaactacagagtaatgaaaagctctatgctgaggccagaatacctgcattctcctagtgattctaccatgtactaactctctaacttcaagcaggataattaaacttattgggcttcagtttcctcccctgggaaacaaggatggtaatactaactcatgaggttatttgagtattaaatgagttaatatccataaagaattagaataatgccaagtacacttagtgcctagtcaatgctggtcactgttattgttattgtcattattctttttcttttttttttttgttgagacagagtctcgctctgtcgcccaggctggactgcagtggcacgatcttggctcactgcaagctccgcctcccgggttcacgccattctgctgcctcagcctcccaggtagctgggactacaggctcccgccaccacgcccagctaatttctttttgtatttttagtagagacggggtttcaccgtgttagtcaggatggtcctgatctcctgaccttgtgatccgcccgcctcggcctcccaaagtgctgggattacaggcatgagccaccacgcctggccagttgtcattattcttataaagtaattacagtttaaaattcaagttaaagtgtacatattgtgaaatgagcttttaacactattctgtaactaattttttaaatgcctggggtcatttgaagaactccagcaaacactctaacaaatagaagacagaaagaaagcaagccttcatttgcataaaacggccaaagaacaatagccaaataaattccatgtttccaaaagttaagctctatacacctatgctcacagcagcattattcacagcagccaaaaagtagaagcagcccaagtatccatccataatgaatggataaacaaaatgtggtcgccaggggctgggggagggaggagtaggaagttattgtttaatgggtagagtttcggcatcccaagatgaacagcattatggagatggatgctggtgatggttatactgcagtgtgaatgtgtttaacactactgagctgtccaacctgcccattttatagatgagaaaaataaaattgagaagaaaaaatttgttcaagtttgcacagaacttcttgtaaactaatatagttttcagcttccatgtgtcttcataatacaggaatctcaccatgctggaaatgattcgaggtttttaaataatactaatttttcagacaaggtggtccccctaaagcaaagcccactacttacttggagcttcacagtagaatcagccatcatttccagcgctaaatatgacaggcttactgagggatagaatacctggatgctctgctctatgggagatttaaggaatttttcatcagtaattttgactgaattccattttcaccctacatgctgaccaattaaattgttcctcttaatgttagtcagatagaagccacggtaggtatttcagcagaagaaatttaacacagggaattgattaaaccggttttggaggtctgagagaaccaaaagggaaaaatggaggctatcctaaaatcgtcattatgggaaacagcacaccagcctggggctggggtatacggcagtggttctccacttcagcttcatcagaatctcccagagggtttgttcaaatataggttgctgggccctgtctgctggaatttctgattcagtaggtctggagggtgaacctcatactttttaattagcatttcctaagtgatgctgatgctgctggtcccaggaccacaatttgaggactgcaggtctaggggaagatcttggagttgtcagaacgtagaagctcagaagaggagcctgagagcaaggactgaaatccctgagaaggtactgcccagctggtggtgttgtctcaagatctcagagggaaaaacctcatgaagcctggactcacgcctcacaggaggagaaattgcccggctggtgctggtaccttcaaggaggtaagataagggtgattctggaagtaccaaaagaacctgaaggctagaaccagctgtcactacgaaggtgagaggaatagcaagaggaaggagccaggccctttgacctccttgaaccatccggtaaccctgtagtgctccctattgacagaacctaaagggagcagcagacacagcggaaatatgatttgctgacctagcatcaaagaacaaggcataaaagggtgaatttggagcccagaaacaataggtgaagaccagcgtacacacaaagcacacgctttcctgcagcatactagcagagaactcaagtcactgtgttgtgtgtggttttttttgttttttttttttttttttttttttttttttttttttttgagatggagttttgctcttattgccaggctggagtgcaatggcatgatctcggctcactacaacctccgcctcccaagttcaagcgattcttctgcctcagcctcccgagtagctgggattacagacatgcgccaccacgcctggccaattgtgtatttttagtagagacagggtttctccatgttggtcaggctgatctcgaactcctgacctcaggtgatccacccaccttggcctcccaaagtgctgggattacaggtgtgagccaccgcacccggcccactgtctgtgtttaagagccaacttgatcatatgatccagcagtctcactactagatatatgtccagaggaaaggatatcagtatatcaaagagacatctgcactcccatgtttattgcagcactattcacagtaaccaagacgtggactcaacctaagtatccatcagcagaagaatggataaagaaaatgtggtatgtatacacgatagaatactattcagccataaaaaaatgaagtcctgtcatttgcatcaacatggatgagtctagaggataagtgaaataagccaagcacagtaagactaatactgcatgatctcacttatatgtggaagataaataagttgatctcatagaagtagagggtagaagtggtaactagatgctgggaaggatggatggagaagggaatagagaggttggttaacggttacaaaattatagctagataggaggaataagttctagtatttgatagtactgtaaggtgactagaattaataataatttattctgtgtttccaaatagctagaagaaaggattttgaatgttcccaacacaaagaaatgataattgaggcaatgggtacactaattaccctgatttgatcattacacattgtacacaggtattgagatattacactgtattccataaataggtacaactattatgtgtctattaaatttttttaaagagccaaattgtacaaaagttgtttgttttgaaatattggaataatactcatcatggagagaatctcagactgcgagatgacagcaatgttttcaattccactctcattcttgtgcaccttcttattgagtagaatggtgaggccacatagctagatttataaaatttaaacaagtatatgataagattccttggtacacgtagattttataaaaattagattatattatgcataatattgcaaaacttcctttttcatattagcaatatactgtgattatctttctcttccaattaatacgtgttctttcttttttagagacagagtcttgctctgtcgcctaggctggagtgcagtggcacgatcttggctcactgcaacccctgcctcccaggttcaagtgattctcctcccttagcctcccgagtagctgggactacaggcatgtgccacgacacccggctaattttttgtatttttagtagagacggggtttcaccatgttagccaggatggtcttgatctcctgacctcatgatcccccggccttggcctcccaaagtgctgagattacaggcatgagccaccgcacctggccaggttctttcttttaatggctacataacattctattttatgaaagttccaaaatctcttaacacttcctttttgggggcatttagtttacttctattgttttgctatcacgaacagtgtttcagagatgcccttgccctcacattcttgcacacttgccagttataccctacggataaattcttagaagtgaaatttctagattaagggatgagtaatgttagatttttttacttatatgtatcttgatatccttttaaataaatttgggaaattaaagtcattttccttaaactcttataaattttaagaaaaacaaaagtattaataatcgaagtgttaatattgattatttctagcacattcagtttggggaaaatttatgatctagtagagtagtacttttgtgaggtagatgtcacaaaaaatgtgtagtatggagaaattgtccagtagtatgtccatttagtagaattttgagaataacattttgccataaattttatagatatttaccattaatccatttgtagtcctacaacatatagttgattacagttatacattttttgctgagtctttggttcaaagcatgcagttcccaattacaaagacattcctaatggaataaaacatccactttgtgactgatttaaggttgttttcttaaagcacaccgcagccaaaagtggacacagcttgaatagcaaattttttcctttttgttgttgttgcttcatccaataactgttaccaaattcccgtagaaaagtgttgcccactcccacatcgacctttggaagcataacattcagctttggtgtctatacacaatttaatttggaaggctcctcacaaatcatcttattttccagtttcaaaaaccaagttctgagtggagattaagacagggtctctttatttcccagtgcagtctcctatctatttatttgtgaatgaatgaattagttaattaatgagccagggtttcactttgtcacccaggctggattgcagaagaagtcatcgtggccaagcgtggtggctcatgcctgtaatcccagcactttgggaggccaagacaggtggatcacttgaggtcaggagttcaagaccagcctggccaacatggtgaaaccctgtctctactaaaaatacaaaattagccaggcgtggtggcgcgtgcctgtaatcccagctactcaggaggctgaggcaaaagaatcacttgaacctgggaggcagaggcagcagtgagctgagattgcgccattgcactccagcctggccaaaaaatgtgaaactccgtctaaaaaaaaaaaaaatccaatctttcctattggctttattaaatacactttaactttagaagcttagaagcacaataattagaactggcctaactttaaaaaaaattttcacaaagaaattagtaacttgtagggtcatttgtaatctttttctctgttgatttttacagttttaaaaagttaatacaataatttatttacttattttttgagacggagtctcgctcttgttgcccaggctggagtacagtggcaccatctcgggtcattacaacctccacctcccgggttcaagcgattctcctgcctcagcctcccaagtagctgagattataggcactggccaccatgcccagctaattgttttgtatttttagtagcgatggggtttcaccatattggccagtctgatcttgaactcctgacctcaggtgatccgcccacctcggcctcccaaagtgctgggattacaggcatgagcccaatattttaaaaatagtacattattacagaagctagatgtgcactttaaattattatcagaaaattagtatgacagacaaattctatgattgtcccatcatctgggcctgtgacattcacacctttgtgatgttcatccccgactgtgggtgggacctgggacttgcttctgtcaaaacaatatggcaaagcatgagaggatgtcacttgtgatcatattagatagcagccaaaatggattaaagacttaaatggggccgggcgcagtggctcacccctgtaatcctagcactttgggaggttgatggcggcggatcacctaaggtcaggagtttcagaccagcctggacaatatggtgaaaccctatctctactaaaaatacaaaaataaccagatgtagtggcggacgcctgtagtcccatctgctagggaggccgacgcaggagaattgcttgaacctgggaggcggaggttgcagtgagctgagatggcgccattgcactcaagcctaggtgtcgcagcaagactcggtctttaaaaaaaaaaaaaaggtaatcatacctcactgcagccttgaactcctgggcggggttcaagcagtcttcctacctaaacctcccaagtagctaagactgtaggtgcacgccaccatgcctggctaagttttgcttttttttttttttttaagagactgagtctcattgtgttgcccaggctagtcttgaactcccggcctcaagcagtcctcccaccttgtctacccaaggactgggattaaaggcataaaccactgcacctggcccagtctcctttttgttacaacttcctccagctctgttttgctctggtgtgagacatgagcatggttcattaagaggcttggcccccccagccccaggaaagaacaagccaacaaccgataggaatgtagtactgtttttagtcctttcctcaggactggtttgtctgcataagatgagtaactacctgcttccaggtgagaagaagacatttaattttagagtagtccagccaggaagctgagatgtcattcttatcaaatccgcagtttcttcagaagacttgaggcctggctgagattctgtagtcccaaattggagcagtcttgagacatccaagattcttcggttctcattttagacttgccgtctctctcacaaagacccactgttttctctcacaggcaggcccccgccacttaaacgtgctgtgcgacgtgtctgggaaaggccccgtcactgcctgtgactttgacctccgcagcctgcagcctgacaagcggctagaaaacctcctgcagcaagtgagtgccgaggactttgagaagcagaacgaggaggcccggaggaccaataggcaggccgagctctttgccctttacccatcagtggacgaggtgggtgccactgtttccatactggagaatctcagtgaagactctgagagtcatgtggacaattgtgttgttcattattactatatagcagcccatggtgtcagggctcacttgtatgatttctggggcctcgtttttcactcaggcaagcctgtgtgtcatagcagagccattattgattatcacacagatgggattctgataataataacaactggaattttcatagcactttacaaaatatgttcactaagagcatctcatttaatccccaaatgtttcaagggtctacatgtagtaatcacacccagcaagtcaaaccatcctattatttgaggggatgtgtggtcactaatccattgagacatacattacttaaactttgatgttctttagtgctttgttactttctttttaatggtctctatgagcaaccagagagacctgctttgaaaacatttcaggctaggataatcacagcccatgctcccaatgtatagaactttgggatcttgattgtttacttcttcatttattggagctgactgacaacaataggataatgtagactttgcctgtggtcactgcctgaggcactttggatgaaatgagaggtgacgattattcaagccttttgtctgtttgaactccttatactgtataggaggctctcagttttcccctctgcgtgaggttatctacacttctgggtcttgccagaacagattactgctatatctctgctgtccaaatggtattgaaagttcagttggaagaaacaggatttgaggaaactgcataaaagatattctatccatccatgcctctaaatatttgaaattcgatccttggattaagtgagacaatcagagagcctgatacccccacccttctggattgtgtttgctaacctgcccttcagtgagctcacgactggtcagcaaggaggacaataaaggaaacagcagtcatgagataggatatcacgtccacatggaaatactattgttgacattgacctactcaccatctagcaccttcctctttgatgatctaaagggcaattagccttcacatcttccgagaaagaagaagcacgcttctgctgagataatacaaacacttagagattgtgctcattttgtaactaactctcttaagttctttacttagagcaaacttctgtccaccttcaccaaatgtggcaacttaatgattggggtcctgaatttactccagctttcttttcttttcttatcctgattttctaagcaccttggtttcctcatctatttttattttatttgcagtttttgtcagcagcctcaaatggtcttctgaatgaggcagaatataaaaataaattatctcacttatatatagaatctaaaaaagtggatctcatagaaacagagtagaaaggtggttatagcaggggctgtggggagagggagaaggtgttggtcaaaggccacaaagtctcaggcgggaggaatacgttttagtgacctatcgcactgcacagtgaccagagttaataataatgtgttacatatttcaaaactgctttaaaaaaggatttttaatgttctcatcacacacacacaaaaggtaagttggtgaggtgatagatatgttaattagcttgatttaatctttctacaatgtatgcatagatcaaaacattacttgatttaatctttatacgatgtatacatagatcaaaacatgacactgtaccccatagatgttcacaattactacttgtcaattaaaaaataaattaataaagtatgaataatgtgagcaatatcatcatctcctttcctcagattaaaaagcaacaattaggctaaagagctttttcaagattcaacagataaattaaattacaaaatggggccctaacccgctaactacaaagttcgtgttcccttgtttatgtatctacatacatatgactacctggtatgttgggacacataactgaaatccaaatatgatatttttaaatatcatgtaactttttagtttccatccacgacattaagactttttaccagatttgtcaaaacatattaaatcagactgatttggcctttactttccttcctcttcctctcagttctgtgatggagatgccaacatgtaatagagggacccaaagtggatgccagaagagagagaacaattaaaggatgcagagaatatgtccagtgagacgtttgcttgtcagtgtctccctggtggtattagaggggagaatgttccatctgaacagattaaaataatgaaacgtagcctggttttagaggaactttgttttatgatctttgaaacaatgcagacgctccattgggactgaatgttataatctgggagcaggcctaatggggcctgcttttattgagtagagagaagtgcttcgtaattagtgttgcagttatttgtaaactggcgtgtctaaaatgcttgagggcctctataccagccctttaatattttgaagctgttgtcacagaaattgcatttgtatttataatttgtgctttctccaaagaaagttctatggaagaaaggtaaatttctgcctactctgacatgattacaaatgctggttttttcgatgacacaatcagatttttaaatatatcattacttgatttccctgtaaggaaagttagaagagaggtaaactagtatatccaagttatggctgagtctacaggagaagcaaaagttggacttaaccaccaagcttctataaggcaagttctttccctaattcattctgagtctacaaaaggcggttattctacaaaaggcattctatgtcaatccctaagaaagattccactgatactccaaattatagaaaagtttgctgaggctgttggttacaagtgacagaacccaactaaaaccaattcagaaaaaaaggctaggggagtacttcttggctcacctaagaaaatcacaggtaggcaaatgtggagttgacctctggatccattgggagagtaaatgaaagaatatcatctctctcatactgtctctttctctctcattatctctttcattccgttcatttatatatatttttaggatgatgaaaacaagaggtatccattaatgtttcacatttccactttctgtttgcttgggaattagttgccatttcagttagctataaagcctgaggaaattcatatagcttagaagagactgaggaaatatatcacccaaatgtcatatgtggaccttgtttggatcttgatttaacaaaataacagtaaaaacaaattgagacagtcagggaaatttgaaactgacaaaaattatttagtggcaataagaaattattaatttttaggcataatggtattgctgtatgtttttaaaagtctttatcttttaaagatatgtactgaaatatttatatatgtatatggtctctgggaagttgcttctatgtaatccagtattgagcgagaaaggtggtaagtgggtaaatagatgaaaccagaatgcccctgaattgaacttgttgaagctagatgatgggtgaatggttcttcattgcattgctctctcaacttttgtgtatgtttaaaattttcccaatgaaaatcttttttaaaaggatttcaaaaattagaatctagaccaaaggcagtcccagaaatccatgagtgtctctaccttcaggttgttttccagttagggagatcttccctttagatatgtctgttccaatgatcctaaaaggtccagattgccctgagcgagtaggcatcaaaacaatgtctcctctgaaataaactcagccattccacccagcaacatggccaaccgccgtaaccacaaggaatggggaccacagggagaggttggagtaatgatgagcttaccacattgatcattccatcaaagtgggtacatatttaccaggaaggtgactttactgctatttgcaagaatgttaagcttgctgtggggtattcactggaaagctcccaggaaaagacagtgagatgtgaccctgttctttggacccttgcgatgggcagagcactcaccagtgtttggaaagcatactgcaagagtgggaattactgttttcaaggatttgcactacttatttttgcatacatgaatataattaacatagaatgatagttcagatacagatgttaaggttacaataggggcttgatatttctctttaagtgtttagtttctgtgcggtaaaataaacaggtagagctcttaatttgtcattactaaatttcatatacctagcactttaggaagctctaactgcataagcctgtctagaacttgtcaattcaaccccaagtctctatcatctgtttaagaaaacagtgaactgagaaagtgactctgtattataggatcaatggtttacagccttaagtgaaccattctgactcagatttcaaatctgaaactcacatacttactagtaaagcccttgacaggagaaatattgcaaatgtgtaattagagtgggcaaaaaacacacaaaaacatcaacaataggtataagattttgcaatgccatctggtggatgttactaagccatatccatgttcacatttccttccttcctgcttcagtctctttgtcttgaatgcttgggtttctaaaaggagaaactgttttgctgcaaatgctggctttgaggttgggggttggaagagaaactttcttataaaaggcagagtgttagaaaaaaagcaaatctaagttaacttgagccgtggagggtagccttcccttccctgggttaactctaattggagctccccacagaattcactaatgatttccttacgatgtgattaaaaataggaggatgctgtggaaatacgtccagtaccagaatgtcccaaggaacacctgggcaacagaatattggtcaagttgctgaccttgaagtaagtatcaacaaacacactgccaccgctttgagatttatcttgccttttacatacaaatgttgtgtttattatcagagcttgaatcaaagcggagctcccaaaatacgtctaacagtgggcagctgtggagtagtagaaagggcacgtttgagtccattcctggattttttttctaccaacttcttgatggtcattcttctacaatagagaaggcaaacacacgtgtctactaaagttaggcaggtaaggtcattgagtgaaatgacctacattaagaaaaatagcgcttaagtcagtggtgtgctggagtcgactgtactaactcgtgagatctgacagtgcatatctcttcctgggttcggtgaagtcacattggtaactttaaattggccatggcgaaagtatttacaatgtagaaatcagccaatgctacacgtttgcaccaccctcagcacccggagattatttgtaaaacatttaccagtatgccactgttgaaacacaatgataaatgcaactgaaactcagtgccaggggacaatagggagtggtgaggactgtagtaaactatgttaagggggcactcactgctagcaacagactcttgccatccaaataaacaggcccatttttgtcaactgtcttttctattttttcaagagaagctgaaaacccagatttttctgcataatataccgactccctaaatatgttctcattccctttataaacaccatataattaaaacacgactacagtctggtttcatcttgtgggccaattatttgccacatctacttcaaagtagttgcatccaaacgtttcaattgtatactatgatagcaaaaaaaaaaaatcctctatagacatgtattaattttgtactttcatattaaaatattatctacattataaaacataatagaaattttaaagatgaactagataaatctatataaattctagtattttcttcttccactgcaatagattgtcttgtgtaccctcggagtgcctccatacctctcttcgtctctgcagactgctattttcaagaattagttctccttcaaatccacagatgaaaactttaaagttgtacatattttacctaagcaaaactacagaagcgtaacatttatttatatactattagatgggtcatccatctctcaaagtcacttcataggtcccttcagcggcccctggtttgcagtgagaaggcatctggattctggatgtaaggctgggtttcaacccctgggaacttccctgggattttgagttcttccctataaatgaagttgatagaccttatggtctcaaaattcctacctaccacaaacttctatgattctaacgcatagcctctgccaacttcttctgcctcagaaaacaagccagcaagtctgctcacacagctatgggtggtctcttgatattatagtctcctcccgctggccagttctaccagagggtcttcagggccttttgtacggagaaatgagcagcccataaaccagctgagtgtcaagtaatgggcacagaaaagcaagctcttgcccttgcaaaccaacctggcagtgggagcttcctcatctgtctggttggcgggaggactgagtggaagtggctcttcccctctgcattgtttaggaagccttcgctattgtctgagggacacacctgccccgacaggatgcatcatcaggctacttttagatgcagcgactatgtcatttgagatggcagaaattctcctctatggtgctcatagccaagctttctagacctctccagtgaatgagaggcagctgttctcacaggtgggaaaacatggtcactaagagagatatgtgttattttaaaaaaatgttaatggaggccaagtgtggtgactcacacctgtaatcccaacactttgggaggccaaagtgggaggatcgcttgaggccaggagtttgaggccggcctgggcaatatagtgagaccccctctctaccaaaaactaacagatgtgttaatttttagccctagctacattgggaggctgaggtggaaggatcgcttgaggccaggagttcaaggctgcagtgagctatgatcatgccactgtattccagcctgagtgacagagtgagaccctgtctctaaaattaaaaaaagaggagtcacttgaatatctcttaatgaaaattgtaaagtgcagtttctagtgatgtccccgcaactgccaaagcagaaattaagtcgaattgacatatttgccaggtgcacttggcctgctcatgtgttttaaatagtatctatactaacctataactgcaagagaagagatagaccaaaaagacagccctccgagtaactacttagagtaaactagatgaaagaaagaaacaaattcttataggtaagcctagaatgtgacagtatgaatagtaaaaatataagggtaatattaatggcaaatgttttcccatttacattgatatgtaggattctattcataatactacatgttttagcccctgaggaatttgtttaaagttgtagacatctgtaactgtctctgtattgcttttcagaaatatagaaaccctcaaagatacagagagaattagggtcctgccaattctgcaaatgtttgtaacagaaaaaaaaaaaaagaatgacaacaaagtatttttctgttttgtgttttaaatggagaaatattttaagatttaataccatcttatgaaaagtaatctcagctcttaggagtcttcttgatggtgaaactttaatgtgcagaaaatttgcccaggcagtttcttttaaatgcagattttggaggaccttccataacaatctccctcaagagattctggttgagtaggtctcaggtgggatcaagaaacctgcatgctggctaacttcttttgcttcaaaatgctagattctggggactacacttaaagaacaaacactcacggaaaaagcccaggttctgtgatcagagatggctgggctcaaaacctgaccgaacactcacggaaaaagcccaggttctgtgatcagagatggctgggctcaaaacctgaccgaacactcacggaaaaagcccaggttctgtgatcagagatggctgggctcaaaaccggaccgaacactcacggaaaaagcccaggttctgtgatcagagatggctgggctcaaaacctgaccgaacactcacggaaaaagcccaggttctgtgatcagagatggctgggctcaaaacctgaccgaacactcacggaaaaagcccaggttctgtgatcagagatggctgggctcaaaacctgaccgaacactcacggaaaaagcccaggttctgtgaccagagatggctgggctcaaaacctgaccgaacactcacggaaaaagcccaggttctgtgatcagagatggctgggctcaaaacctgaccgaacactcacggaaaaagcccaggttctgtgatcagagatggctgggctcaaaacctgaccgaacactcacggaaaaagcccaggttctgtgaccagagatggctgggctcaaaacctgaccgaacactcacggaaaaagcccaggttctgtgaccagagatggctgggctcaaaacctgaccgaacactcacggaaaaagcccaggttctgtgaccagagatggctgggctcaaaacctgaccgaacactcacggaaaaagcccaggttctgtgatcagagatggctgggctcaaaacctgaccgaacactcacggaaaaagcccaggttctgtgaccagagatggctgggctcaaaacctgaccgaacactcacggaaaaagcccaggttctgtgaccagagatggctgggctcaaaacctgaccgaacactcacggaaaaagcccaggttctgtgaccagagatggctgggctcaaaacctgaccgaacactcacggaaaaagcccaggttctgtgatcagagatggctgggctcaaaacctgaccgaacactcacggaaaaagcccaggttctgtgatcagagatggctgggctcaaaacctgaccgaacactcacggaaaaagcccaggttctgtgatcagagatggctgggctcaaaacctgaccgaacactcacggaaaaagcccaggttctgtgatcagagatggctgggctcaaaacctgaccgaacactcacggaaaaagcccaggttctgtgatcagagatggctgggctcaaaacctgaccgaacactcacggaaaaagcccaggttctgtgaccagagatggctgggctcaaaacctgaccgaacactcacggaaaaagcccaggttctgtgaccagagatggctgggctcaaaacctgaccgaacactcacggaaaaagcccaggttctgtgatcagagatggctgggctcaaaacctgaccgaacactcacggaaaaagcccaggttctgtgatcagagatggctgggctcaaaacctgaccgaacactcacggaaaaagcccaggttctgtgatcagagatggctgggctcaaaacctgaccgaacactcacggaaaaagcccaggttctgtgatcagagatggctgggctcaaaacctgaccgaacactcacggaaaaagcccaggttctgtgaccagagatggctgggctcaaaacctgaccgaacactcacggaaaaagcccaggttctgtgatcagagatggctgggctcaaaacctgaccgaacactcacggaaaaagcccaggttctgtgatcagagatggctgggctcaaaacctgaccgaacactcacggaaaaagcccaggttctgtgatcagagatggctgggctcaaaacctgaccgaacactcacggaaaaagcccaggttctgtgatcagagatggctgggctcaaaacctgaccgaacactcacggaaaaagcccaggttctgtgatcagagatggctgggctcaaaacctgaccgaacactcacggaaaaagcccaggttctgtgaccagagatggctgggctcaaaacctgaccgaacactcacggaaaaagcccaggttctgtgaccagagatggctgggctcaaaacctgaccgaacactcacggaaaaagcccaggttctgtgaccagagatggctgggctcaaaacctgaccgaacactcacggaaaaagcccaggttctgtgatcagagatggctgggctcaaaacctgaccgaacactcacggaaaaagcccaggttctgtgatcagagatggctgggctcaaaacctgaccgaacactcacggaaaaagcccaggttctgtgatcagagatggctgggctcaaaacctgaccgtgccagtccctaactgtgtagactttggcaagttccttattccctgggaaccttgctttcctggtgtgttaaatgcagataatatctgcattacgctgtagttgtgtaaagagactgatgtgtggaaagcacttattataacacaattttaagtctttaataaatgtcaattctctttttctttctcggaaccacagaggacttactactcagtaccaacctaagtatatcacagcaatattcaggccctttgtgtagtagggagtaaacaattaaatatagattgagcatgccaggcagcagctggtgagcctaggcccaggaaagcctccaattggcctggtgcagtggctcacacctgtaatcccagtactttgggaggctgaggcaggtgagtcacctgagctcaggagtttgagaccagcctggacaacatggtaagaccccatctctactaaatatacaaaaattagctgggtgtggtggcacatgcctgtagtcacagctgctagggaggctgaggccgaagaatcgcttgaacctgggtggcggaggttgcagtgagccgaggttgcaccattgcactccaccctgggtgacaagagcaaaactccatctcaaaaaaaaaaaaaaagaaagcccccaattaatgtgcaattacctaataatagaaagaataatcatagaaatcctcaacactgggcttttcggtggtaaaatgtatgtaacataaaatctaccatctttttttttttttttttttttttgagacagagtctcactctattgtccaggctggagtgcagtggcatgatctcggctcactgcaacttctgcctcccaggttcaagtgattctcctgcctcagcctcccgagtagctgggattacaggcacttgccaccacgctcggccagtttttgtggtttagtagagacagggtttcaccgtgttggccaggctggtcttgaactcctgacctcatgatccgcttgcctcggcctcccaaagtgctgggattacaggcatgagccactgcgcctggccaaaatctaccatcttaaccatttttaaggtacagttcagtggtgagtacattcacattgttctgcaaccatcaccaccatccatctccaggaatttttctcttcccaaactgaaactctgtacccgttaaacaataactccttattctccctactccccagcccctggcaactcccattctactttctgcctctatgaattttactactctaggtgcctcatgtaaggggaatcatgaagtaactgtctttttgtgactggcttcttttactcataatgtcctcaggttcatctatattgtagtatgtatcagaatctccctccttttatggctaaataatattccattgtatatatgtagcatattttgttatggcctcatatatgtatctgttcatggacaagtgggttacttccaccttttggctattgtgaatagtgctgctacttggcattgtttttaagatacattcacacacatcattatacgtgatcctcacaacaaccaggaaaatggaaaggcaagcatccttaccttattttgcagataaataaatggaattcagaaaggcgagtaacctgattagggtcgcagaattagcagatggtggaggaggaacagagtccaggtctctgcctgggtgccctgggagtctgccatgattccaaattgcctcatttccaaaggcgccatttgagcaaataaccctttttgtctgtgctcatattctgtccaaatattcttctaaaaagtcctcttttgagacaaagctatccattgatgaggacatcctctcacacatacctggagacaaaacatgactttattgacatgatgtctgaggtaatggtggactggggcccttttcctggtgctctctgcaggtaacatccaaagccatgggacatcaagctgagaaacttggaagaccttcaccagtgttccatgtgcacctgtaatgtccaccaagatactaaaggcaaataatgcaccaggattatgctttgggattcaccgtttcgaggggaattggcaattagggccaatatgagggctcatctttctagctctcatggggcccaggcacctcagtgtttatctgctgtgctcaagcccctccctgacctcaactcagcaactccccagtaatggagttaggaagggccagacattcatccccatcaaaacccagccttcttctgactgtcccactacaaatctaaggaaaagcaattgaacttttcttttgttgccatctgaaaagccccattccttagaattgaataatacagattctatcctttaaatttttttatttcaatggctttagggtaagtggtttttggttacatggatgaattgtatagtagtaaagtttgagattttagtgcacccgtcacccaagcagtgtacattgtacccagtatgtagtttttttatccctcatccccctctactctcctgcttctgagtctccaaggtccattataccactctgtttgcctttgtgtactcatagcttagctcccactaacatacagcatttggtttccattcctgagttacttcactcagaataacaacccccggctccatccaagttcctgcaaaagacattaattatttccttctattttatggataagcagtattccatagtgtatagataccacattttctttatctactcattggttggtgggcaattaggttggttgttggttccatatctttgcagttgtgaaacagatactatctagcaataaaatgtgaaatgtgaacaagtccattacctcagacagaaagtctaccctctgaaaacacagtagttacaataagaaggtgaatcacactaaaggtccattcagcccactctctcttgcagtgagtgagtgaatgagtgagatattccaaaaatatccaccatgcttttgtaatgtccaccatgatctcaaatgattaggaatttttcacaaacctcctatatttctctattaatatcccagtgcgattctcatatacttggagttttccaaatatttcgggaaactgctcatatttttaaccagtttatctatctaggtgttttcagaaaattcaaaattatctaactcaaagccacatagattttcctctctttctatggtaggttcgagattgaaattgagcccctgtttgccagcattgccctctacgatgttaaagaaaggaaaaaggtaagaaagcaaagaaaaatccatccctaaggcacatatattgttcatgattctttgcatgtatgtttttaaatttctttgcagcaagaacctatcagatttgaaagcaaatgatctttgatgagtccagttctgttgcctttgcaatttttcaagcagtggtctgagaatgtaatttatgatctttgaagaattttagagggagaggctactggaggtgctggcctggttggaatagagaaagaatgaaatagcgcatggggttatgtataaaacaaacccatttaaatacatttttaacaagcttggatgcgcatgtaaagcttcctcagtttgagagttctttgcactgtgaaataggctcatgactgaagggcatcttacatggtagaggtctcaatttgtcacagagttcagaccttaccaactgtaatgtgcttttaatgaaaacagtgaccaagacctctcgtgtgtttttaatgtttagtcattttgtgactcctagaagaggacagcaatagcaaatccagagtaggatggacacttctgcccttctttacccataatcattctgtatttaaggaaacaagcatctcctgcataaatattaataatcactgagatttgtaggataggttaactgctaaaacaagcagaacccaatctcagtggtttaaagcagtagttctcaaacttgagcatgcatcacaatctcctggaggacttgttaaaacacagattgctggacctcacccacagagtttctgattcagcaagtccaggtggggcctgagaatttgcatttctaacagtcccctgctgatgctgaagctactggtcaggggaccacattttgaaaaccgctggcctataagcaagaagttgctgtctttgtttctttaaccatccagggtgggaggagggacccctctgttccacgcagccactcagaaatacaggctggcagtggctcctccatcttcagtatgttctctccccaaattactcttgtcactgccattgctgcccctgaagaagagaaaagaaggatggaggaggcctggaagtttgatacattgcttctgctaacaattcactggagagaattgagtcacatgatcacccctcattgcaaaggaggctggtaaatgtagtctctgcctgggcagccactcaccactaaaattctcatggtgatgaaggagagaacccaaccatacagtggctcttaagtaatacgacactaagagagccaggagcactgttcacatcatgctcttgctcagaatcttcactaagattcattccctacaaccaggctttcttcatgatggcattcctctaccttctttccatccatagtctatgcagagtcaagctagaccgctgactaagcttcccccagccgttcaagcctctgagatatttattcatactctaatctctccctggcacatcatcaccttccacccctgcctatcagaatcttctaaggcccatccatctccagtgctgcttccatgaaaagttgtccttgtcacccaactgcaaatggcctgtcactctggaacttccacagtgcttctttgtatgcatgtggtgacttgtattttgcttttactgtagttagttacatgtttaccttttccctcacctttttttttttttttttttgagtcagggtctcactctgttgcccaggctggcatgcagtggggcgatcttggcttactgcaccctctgcctcccgggttcaagtgatccatcctcccacctcagcgtcccaagtcgctggaaccacaggcacatgccaccatgctggctagtttttgtattttttgtagaggcagggtttcaccatgttgcccaggctggtttcaaactcgtgagctcaagcaatgtgcccgccttggcctcccaaagtgctgggattacgagtgtgaaccaccacacccagtccttccctcattcttgattgtgaattaattgagagcagaggtcctcctcttctgtagtgaagtaactgatactcaggaaataccggtgggttaataaacatttaaatgtttcaaggaacatctctcaaatggctccagaatacctagacattgtgacaaaacatttgtcagatttatccaggagccactttcctaaaccacatctgtgattattacacttactccttcagcaaaatttctctgtggtgtttttactcctttttaacatgtttaaaccatgaatgcaacaggtctaacttatatttcactttgctgctcatttacagatctcagaaaattttcactgtgacctgaactctgaccagttcaaaggatttctgcgagctcacacgccttcagtggccgcatcaagtcaggcgagatctgcagtcttctcagtcacctacccgtcctcagacatctacctggtagtcaaggtaattcagtacgatctgatttgcccaatctgatgttttcattgctgtgttgttcccagcacatgtttggggtgcacgcaatctcagaatgtgtccacatatcctctgagattcactttgtttccttctcagtttaccccttttccgttctaagtaaactgtttcagatactagaaagactaggttttggagacacacagacctaggtttgagtcctggctttacaacctagtaattaaatggcattggcagtttcctggtctttctgagactgagtttcctcatctgtgaagtggagataatcacactgacctcagtggatagtcatgactacagaataaagcttggcacatcttgggcacccttctcctaattaaggagagttccctcagtgacctggtgcaaagaagctgctgtggagaaaggaacaaaatctctgggctagagtttcctaacgatgttcatgttgctctagagatgcatagttacgtgttcccaagtccagcctcttacaagctgaagcgtgggctgtggttttcaagtttcatcctccttttttttttttcttcttaccatgtcacagactgtctctaatgagagttgaaatctatggggcaattgtaagtagaagagcctttcattctaggctatactctttgctgttgtaagaaaaccagatcctttctctgtacaccaaaatgactggttagaaattaacaaacatcaggtattttacctaccttaggccagataattggtcttattgattcttttttttttttttttttttttttttgagaggagttttgctcttgtcacccaggctggagtgcagtgtcaccatgtcggctcactgcaacctccacctcccgggttcaaacgattctcctgcctcagcctcccgagtagctgggattataggagcccaccaccccaaaccaggctaatttttgtatttttagtagggacaggatttcaccatgttggccaggctgatctcaaactcctgatctcaggtgattcacctgtatttggttcccaaagtgttgggattacaggcgtgagccactgtgcccggccgtaaaatcattgtaaaaacaaaacaacaaattcaggtgtctgatttcatgtgcccccagcctcttaggtttggaacattatctagttagtacagtgttttatgtctgtagtctcagtgatcgccccatgatctcatggattccaaataattcaggtagctttgaggtcacttaacagatggcaaatgtcttttcactctagcttctttaacaccatataacaaagattatgagaggttactgtagcttgaggggaacttatttaagcttatagaagtatagttaaaattatattgctgaaaagacacttctattgttgtcaaacttcaatgtgtctccttttcgttgcaatattacttagacatacaggaaaattaaagcccactatgatagccctgtaggtaagttcacaattctctgtcagcctaggaaactgaagaagccaacactagttctatagagccaaattttatctcaaactctacttcccagtggatgactttctcttgattaatccgtcatattctgccaagtaacagtggttacccattggttcctatcacttactaaatatgttccaaaattttcaaatgtataaatgtgttcatttggcataacaaacatactaaagtgtttggataggtttaagaaattgaaatctactcagcaagacagcccctggttggctttctgtttgcttttctttatcgtaatgccatcattgttgcttctttccctttaaatatatagtaaatggtgttaaactatttagcacatccaggcagacattatttggtaagaggggcttctttcttttttgtttatattcccaggccgaacatcagggtctttactgtattttaggtagcatcatctagttcaggtgttgcatataatacggctttaagggattatttccgcttaaaagtttaattcaagattttgtgaaatttttttttaaaaagaatttgttttacaatcaaggaaagaagagtgaaaatgggattgaattggaaacttttcaaaaattgtttaaaaattggtatgccgtgcccaatttaaatatttcataagttgcgatgggcctatccttatgtaagggccacatagtttgagaaaacacaaagcagagagcctagcactttagaagtcttgcagatgttaaatttcccatcttaaagagtttacaatccagttaaaaaaacaacttggcattcaaagaaatgggttcaaattcctattttgctacatttgctgtgtatggtagcaagtttagtctgtcagtctaattggacaatgatccctgtgcctgagtggttttgaagaaaattgaaataatgtatgtaaaaacacctaccctgtacctgacataccataattaggtaaacaataaatggccatgaaatatgaaaaaaataggtatgccaagtgttaatcctaccccttctgaatagagcagaaagtagtctgttcccttaagaaaagttttaggttaatctgataggcttatttgccctactttccatggttatgaggagtcatgcatttcattacacacttttgcataaatcatgagggaacaaacaataggttctcatgtcggtctgcagctccttctcatgaagtacctggagttctccttgcccactgcagccagggcatagtatctgctggtctggtcaaatctgacttctcctgcttcctgtatgttccatgatacacactactagtgcatgaagccgtggcattccccttccttgcttcagggtcctaattaagaagttcttcatctctgttcagaatttattctaaagaccacatttttaatccattcacttcatggaaaaattagcttccttccaatttgttctacaagctcctgactatgagcttcaggagaatgggggcagtgtttatcgccaccttatctcccagctgctaccatatagaaggtactcaacaataagtaaacgattgctgattagcaggaatactggtcagtttctagctcaagtgttacgtgcttatgttttcagtgtggtgcatctctcagtgggattcgccttctcttcatgctgtggcaatgggagggggttttgaacttctttgatgagaagagagacttcctgcttggagtcctccctgaagcagatattcattgagtagcctcatgctgcttcctttgaaaccccataaatgcccctttatcatgggtattgttaaatactttgtgcctaactcacagcacctattaagtatgtgtcccttttgtactgtgttgacccaaattctttcttcaaggatcatctcaactgatgggactaaatccactggttttactcttcaacatctaagttaaattttttttgagcagagagttaggaaatttcaaatttctccttgtctttcttttaaatatggtgcccaaatttatgacaactggccagccagtcactttacctgaagcaagacagaagacacttcattcattcttattaccagcattcattcctatcaacagccagttagcaaagcaagaagctgcacatcccaatgcttttgagtttctttccaagtctgttaaatccagagaattagccctgataggaattacaagggagacaattacagataatttattcggttcagtcattcattttgtggaaggttttagtccctaacccaactttcacagagaccatatctcttttttacattgtaagcaataataaagaaaatgagttttccacttcctacgtatgtctcctgggttttgttttataaaataacttttattgctgtttttattatatacataatacatgtttattgtttaaaatagaaaatacacataagcaatgggaagaaaataaaaatcacacataatcccaccatagaaagttaactactattaacacttgctgcatttgctgagtatctactgtcacccttttaatatgcctttatgatttgttaaataaaattgtatgctattctttatataaattttttaataaaaaaatatgtatcacagatagcttcctatgtcatcaaatattgtcataaaatgtaattttgatggttgcatagattcctttttatggatgtaatttatgtgccttattttaatattctttttattggtagattgaaaaagtcctgcagcagggagagattggagactgtgcagagccctacacggttatcaaagaaagtgatggtggaaaggtatggtaatttgagtgttgttaaatggagacatcttagaagaagcaggtattttcagaagtgttacacaaatagttaatgggctttagtccctaatgtgtccctatataagacactactacattttaattaaataaaagaggaaaagaaaactggtcaccgatgatgactttttttttttttttttttttttttttgaggcagtgtcttactttatctcccaggctggagtgctggagtgcaatcacggccccctacaaccttgaactcctgggcttgaatgatcctcccccttcagcctcttgagcagctggtactacaggcacatgccaccatgcttggctagttttttatttttttttagagatggggtctcactgtgttgcccaggctgctctcataattctggcctcaagtgattctcctgcctcagcctcccaaagtgttgggattacaggcatgagtcaccatgcccagcctgatgatgattttttagagaaataaatccttgaattttctaatgttgacatacagcaaggtctgactgcataacttgattggggcaaggccaccccctgttgtcttcattctgaggctctgactcagctggttgggaggtccgtggagaccccaaaactaaacagtgccagagctctcctggccttcctcaacagcatgggccgctgccctttcaggtatgcaaataactgggaattggctgccactaccatgcattatatatattcattagcacagcataggtgttgagcctatgaaaaggatatcttttctcaacagcaatttgcaaagattcccagtgtgatttttaaaacatggccttggccgggcgtggtggctcacacctgtaatcccagcactttgggaggccaaggcgggcagatcatgaggtcagaagattgagaccatcctggccaacacggtgaaaccccgtctctgctaaaaatacaaaaaattagccgggcatggtggcacgtgcctgtattcccagcttctcaggaggctgaggcaggagaatagcttgaacctgggaggcggaggttgcagtgagccgagatcgtgccactgcactccagcctgggtgacagagtgagactctgtctcaaaaaaaaaaaaaaatagcctttctggaataagacttaccttattagtattgtactctacagactcataaatgtcaagtaagatttattgaactcaaggcattttttttttaaaatctgtcttttattctgaactcagaaagaacaccttggaagtattgtaaacttcctaaggagttgttaggaagctttttagaattttttggagttttccaaggtgacttttggagaaacaggttcacttgggagcttggtagatgatatactaaacttgatttcaagattcttttatgcaaatccaagtcacatagctagccaccaaaagaattgataatctgatgtaatgagtctctttttgttttcgttagctaaaaatgtattttactaattaaatgtagcctttttgtaaactcctcgttttttaatctttatttccttatcagctagacccaagtgcatcatttttctgcctattcactgtttttattttttagtgggaagatatgtttttactctttttaatcagtagggtttggattttggagatggctgtcatattcaggtcagaggcagttgacttggtgctgatgcttgtttcagcttgtttctttccattttcctccagagtaaagaaaagattgaaaaactaaaactccaagctgaatccttctgccagcgtttggggaaataccggatgccctttgcctgggcacccataagcttatcaagcttcttcaatgtctccacccttgagagggaggtaactgatgtggactctgtggttggtaagattttcacctgcagtgggaaagggagggctccccagtgtgcgctgcccaggtccacagcttactagcggggactgggggcacagtgaggtgtgggaagtggggaggcagaaggagataaatagaatgaaacactgttatgactggattacgtagatttggacggtgatctccaaaagaaattatcacgaacattggtgaagattaagtatactcttatagtaagattttctagatggtatgacactttaaaaagctgatttttgctagccacccgctctcaaaagtaaaactttaacaagaaaatgtagtaaccatctgtagtgtgttaagcagagacaccatggtcgactcctaaacctaaaaaaaaaagcctctgttacaaaggcttcaaaaagcaaaactcaacaggaacagggcgtggtggctcacgcttgtaatcccaccactttgggaggccgaggtaggcggatcgcttgaagccaggagttcgagaccagcctggccaacatggtaaaaccctgtctctactaaaaatacaaaaaatttgctgggtgtggtggtacacgtctgtaatctcagctactcgggaggcagaggcaggagaatcgcttgaaccagggaggcgaggttacagtgagccgagatcaggcctctgcactccagcctgggcaacagagcatgactttgtctcaaaaaaaaagaaaaaagagaaaaactcaagtttcccagcaaaatttccagttcgttaaagtttactttgccaagtgcaatgaaaaaatgggcatccaaagaatatttactgttttagtttatttagcatatttctttttcgtcatctcacccgtgatctgaatcattcattcctacactgcttggtgtagaaattttcaaaagggttgcaaattttcaagtagacctgcccatatcacctgtggtggggtttctctttccctaaatgcttttgtatccaccaaatatagaagtccatgttcacatcttttcatgcattccttaagctaaggcttaagccacttctgaaatactaccttgagcagggaagtggaggaaagggcattttgtgattgctgctgctattttggagttactggtacataatcaccagtcagaactcctgggttatttctggttcgtcaataacaaacctcactttaccacatcctgatcttcctgccacagctttctttaatgccgtctatgtagacccaagtaacttattgataagagttatgtatagagcttagagggcacacaagctaggtaattcaggatagggcatgctgaggcctcaatcatctctaggtcaaggataacctgacaacagagactgattcttaaggagcaaccagaagatgcaaagatgtcatgtattatactgaggcagaatggcaagtttaggtgggtagaggtagcaagaaattctaattcaacatcatggtaagaattaaggataagaagatactcaaagacgggttggaactgctctagttctaagcaatttgattatttacaagagaacccatgagtttttgcaatataaaagcaacaagatctccacccaaatcccaaaaggggataagaaacaactgggcaaactatcagggtcccagcccaagtctgagtgtgatttggggttctaattcccattgggcagatcacccaaggcagaaactcagtcttgctgcctggtccacataatgagagcagaggaatgctgggattcagagtgtacacaggctgaccccagcatgtttgggtcacaatcacaaatgccttcaggggcatttgagtacatgcctctcccagtggaatgcaaatatagaaataaaagaaaagcaaacactgtgctgactaaataaagcttatcaggagaccctgttctggctatagctctggactcttgccgggtggcatttgggctaccctaatttccatgtgggaggggcccatggctgctcctggcctctctcctctggtcggaggaggattaaggacaccaacaggaggactaagaaaggtaggggccaatggaaggacattttcattcaaaacaaggatggccatattcagtgttcctgatcagtgactttaatcatacatattgtgaagttaataactgctgtgtgtttgaacagaaaggcatactttggagtgacaattgtttttcttaaagggagaagctcagtgggtgaacggaggacattggcccaatctagaaggctttctgaaagagccctctccttggaggaaaatggggttggatccaacttcaaaacctccactctgagcgttagcagctttttcaagcaggtatctcttcacattacagtgtgtctggatttttccccatactggcatgggcactggaacccacaggaggaggatacgtagtgattaagagagcaaattagttaagctcactctcttagttcattttctgctgcttataatagagtatctgaaactgggtaatttaaaaagaaaagggatttgtttctttcagttttgaaggctgaaaaatccaaagttgagggcccacccttggtgagggctttcttgctggcggggcctctctgtagagtcctgaggtggagcacggtgagcagctgagcatgctagctcaggtctctcttcctgttcttataaagccaccagttcccctcccatgatgcagattaatccattaatctgtgaatggattaatccagtcatgagggcagagtcctcatgattcaatcacgtcttaaaggctccacttcccaacactgccaccatggggaccaagcttcaccatgagttttgaaggggacattcaaaccacagcattcacaaagcctcaatttcattagccagaaaacgggaacaatagtacttaacttcatgtggctagcaggaaggtcaggtgacatgagacctgtcaagctcttcttagagtgcctggaatacagtaagtgctcaatgaatgttagctattttaactgagagaagggttaggttttgttccttgtgataccaactatcctatttgaactatcttggccaatccattcattatgctatgacaacagtctggctgggccatctccttcccggtggatctcagggtttcttggcctggctattcatgtgcaagtttccactttcactactgcttgatgtgcaagtttccagggctccctgcttgctcagagagggtgaccattccagatggtactctttgttagctcagtaaacatcaagactatttaaaaaaataaaaaacttcctagacttgtcaacggtatagagacagaaagtagaatgacggttgccagggtctagggatagaggggtggggagtcactggttaaagggtacagagtttcagattttttttgcaagacaaaagcattctggaggttggttgcacaacaaagagaatgtgcttaacactactgaattgtgcacttagaaacaggtaagatgggccgggcgcagtggctcatgcctgtaatcccagcactgggaggccgaggcaggtggattatgtgaggtcaggagttcaagaccagcctggccaacatggtgaacccccgtctctactaaaaatacaaaagttagccgggtgtggtggtgcacacctgtaatcccagctacttgggaggctgaggctggagaattgtttgaacctgggaggtggaggttgcagtgagccgagattgccccactgcactccagcctgggtgacagagtgaggctccatctcagaaaagaaaaaaaaaaagaggtaatatggtaattttatgttagttatattttgccacacttaaaataaactcgcttggtctgactctgttttggaaagttttccatagctacgcagtcttcgtggagcatttaaaggggttacattaacaaactgaaatgcaaaagggatgctgagggcgcctgtgcaccgtgccacatcatagaaatagtaaaggtctgaaaaggtttctattcagcatacatgtacccttcccaatcttatgaccttggaggacaaggtacttaactaagtctggatggtctcactgggaataagacatatctacccacttaccttactgggttgttgtaaggattggagatcatgcatgtgtgctcctgacccatcttgggcatatgtgggggtggacagcatttatacttaaccttgttcgagacaaatgtgaagaaaatgagatggaaagatgctttctccaccttcgaacatttgaagaagaaagtaaacttattctgtattgttccggggggtaatactggcatcagagggtgagagttatcggggggaagcttttggcctggttttctaatggtcagacgggcttccttagaatgcagcagatgccccatccccagaaggactgataagaggccgaggcacagtgagtcacagtgattgagaaggatttaacaagaagtggagctcagtgatttcagagctgtctataatcctaatttctatgaaagacttgtgagaataaaacttaaaggtaaaaatcttcccagaaatcgtttgtccccaacccaagagtcaaaggtgcatctacattaactctgacttttctcttggcaggaaggagatcgccttagcgatgaagacttattcaagtttttagctgactacaaaagatcatcatccttacagagacgagtcaagtcaattccaggtgtgaatgacttatctttatcctctttagctgtgccaaaactgcttatcgttagacacagtctttgtctaatgccagaatttataaaatcatgtttgccaagtgaaatgtgagattttgtgttaggggttaagaatctgaattgttctatgtctttggcaaacctattaatgtttttttaattttcttaaaggattgatttagtaaacaaaccttgtgctttagatctggtttctcagataatgagataattgtttaaacagaggagcccctttaatcaaataaaatattatacttagtattaaaaaagtaaatgtgagatgctttggtagaaggcaaaggcatcttccttatcctcactcggcagccctggaggtacttctgtagcatcctcaggtccagggaagccagtttgtgtttgtttttgtttttttgagatggagtcttgctctgtcaccaggctggagtgcagtggcacaatctcagctcactgcaacctctgccttccaggttcaagtgattctcctgcctcaacctcccgagtagctgggactacaggtgcctgccaccacgcccagcttattttttgtatttttagtagagacagggtttcaccatgttggccaggattgtctcgatctcttgacctcgtgatccacctgcctcggcctcccagagtgctgagatgacaggcgtgagccaccacatccggctggaagccaattttaaaactcccaatttttactgctagcaatgcagggaagttacttaacaatgtaaaattatactgtggtaattcaggaaagaactttaaaaatcctctaatccattccttctcattttacaatttcttgctttatattttattttatagaggctaaatctcgaaagttatcatgacacacttttctcaagctgtaggaaattagctccaaaacttttttacagtactatagtttgttcttattttcatgaaagaaacacagtgcaacaatctttcttgattccctcataacatgacagtttctttactagaacattcctattttctctctttaggcttgctaagactggagatttctacagctccagagatcatcaattgctgtctgactcctgaaatgctgcccgtgaaaccctttcctgaaaaccggacacgcccgcacaaagagattttggaatttccaacacgagaagtatatgtccctcacactgtgtacaggtaagaaacacaggctcgggctgggcgtggtggcttacaccataatcccataactttgggaggccgaggcaggaggattgcttgagctcaggagtttgagaccagccttggcaacatggcaaaaccgtgtctctacaacatatacaaaatttagctgggcatggtggtgcatgcttgtaatcccagcaacttggcaggctgaggcaggagaatcgcttgaacccaggaggcagaggttgcagtgagccaagattgcactactgcactccagcctgggagacagaaccagactctgtctc

SEQ ID NO: 15556 - DNA, 250395 bp, Homo sapiens
gacagacgaggtttgcgcttggctgggcatgttccgcggctactctgcggcgcgccaggcccccgctttccgcaccccgcgaccctagaagccaccgaaccgccggcgggccatggccactctgccgagcgcagagcgccgcgcgttcgcgctcaagatcaacaggtaagacgccccccgcggcgcgcaggttgcggccggacagcccagcgctggtgtgaagcggagcttcgctgcaggggccgaggccggacgagtccattcgcgtccgcggcggggcgcgcctgagacctggggcgcccggttcccgaggctgcggcggtggagccgctggacgcgcggcggctcctgcgctgggcccggcgaggtcctccccaagaatctcggtgctcctggatgtcctcagccgccggggatcccttccccgaacaacctcgcccgctccgccctccaggttcttacaggtggccgggtcccagaagggtgataggcgcctgggtaaccgtgttgggcgcgccacggagtgtctcataaacggctccttcctttgaggcaagtctgagcgcggggggaagaagtgaagtggctgaaattagagttgcgtttgaggcaggctgcaagccttctgtcgtcctgagcaaggctccgtcctcgcctgcttcattattccagaaagagcttggctcctggtggcatcgctatttttataccctggtccaaaggagccatgaagtggaaaaagtgattttttaaaaaatctacacttaaataaaccaaaagaaatggcctgtggctgacattttgagatttacagaactccagcaaaaagctaaggactgggggatcccaactcaccatccaattcctaatcaaagttgcacaaactaaatatgtaagcacatttactgctcaaagttctcagtaaaggtgctttaactgcagtttttcctccactaaaaactgctgacaagtaattgggacatttttgtcttgccctgagaaagctagactgtctagttaaaagataataggaaactcattctaaagtgtcaacttattctattgcccacagggctgtccgatttgttaatcttcacttagctgagcctgtgaaaggtggattccaccgtaggttcatctttgtgctgttagtgtgtgaagaggtttgaacaaggaattaaaagcctagaaaaacaaggcgataaggtcttctagagggcatatcgagctttattgacgattttatttccacttgatacgtgactgccagcaaactgtttctcttaccttactatttcgtcatctgtaaaatgagtttaattatttatgtatattgcatattaatgttggaggccaaaaggtactagtcaaaaggcataaagaggctgggtgccatggctcacacctctaatcccagcaatttgggaggcccagatgggaggattacttgagcccagagtttgagaccagcctgggcaacatagtgggacccctgtggctacaaaaaaataattttaaaacattagccaggtgtggttgcatgcacctgtagccccagctattcaagaggctgagacaagagcatcgcttgagcccaggaggatcacagctgtgatcatgccactgcattccagcctgggtgagagagtgaaaccttgtctcaaaaaacagacaaaaaaaaaaaaaaaaaagcaaaaacaaggcatgaagtatatcagggatctccctatgggaatttttttctacattaaggttcatagctgttgcatgccaggaggggtaattcattcaaggagtatagggaatcaaactgaagttactgatgggtgtattatttgctatagctcctgatcctctgtctttgtgaattttagatcaggaagtgtgactggggcagaaagatgttagaaactatggggttgggcagggttgatctggggtgagtggccgagacccggactaatcctacaggcagtcttgcaagcaactgcggggtcggtgtcacctgggggttaagaataaaggccctggttagtgtctgatctgcttgcaaattggctctctgctacaaagtcactgtgcaacattggacatgttacttaacttctctaagctttggtttctttatgtgccaagtagagttgatcatagtacctacttcttatgactgtggggaggattaaatgaataataggtacaaagtccgaattgccaagtgctggatgtgtaacatacacattggaatttagagacagtacagaaaaaataatgcaaaatgtcttgttaatgattttcatgttgattgcatgttgcttgtagtgtctggctcagaataaatggtgaataattcttagttgccatcattaacattacaatcagcttcactgctgtcattatctccatcatcaccatctttgagagcctaagatagaaaggtaggaaggaaagctgaagttggagagcttcaggcagagatcagtttgggttaggtatggagatgccagtggctggctgggagctttcttggggccagtgtttctccgcctgtgccttccatctggtgctgagaacccaaaacacattcaatggaagaaaatatgtgatgaaatctgatcaagaagagccccctcaagtttaataaagtataaaaggttctataatcctcaggcaagaaaatggattggaaattcgtattcttagagttctgttttcctttttgaagcactctgtgtgttgtgtgggagagttatgctaaggagcttggcagaaattattattcaaaggagcagattaataaggacatacctagtattcatatatcatttaatttcaccatttattgtttacttattgtgtcccagacactatattatacagttaatggattttatgattaaattctcacaaaaagcctatcaaactcatgaagtcttgtacagaagaggaaaaggaatcttggagatacagctgcacaaggccatgtaattttttcaagaccatacaaccagcaatggcagagctgggattgcaaactgctccaaagactgtgctcttaattgggccgattgttattttgatgcatatgtatcccaagaatttcctttaaagcaagaggggaattaatttttaaaaaatcatcattttggtagcagcattggcaaagtgttctgtttctgattagtgtttaatatataaacattaacaatgtgatgttttgcaatgttgaaggtggaaaagaaatgttttcccttacgtgcctacctattattttttttaaataggtcaaattccaaaagtaagactgtgttgaaatatggccattagtacattcagcatgtgctcatgtttttcaccttactactcagaatagtgtaaactatctcttaaaaatatttgtgggataaaaccagtgtgcttcctgttaatgaagtattcaaatctgatatattaaaaatattatttgtaaagcgttcagttctgaccacaccagtctccagaaggagtgagcagactatctcacagtctgagaagaaaggtgaaattaattttcttgtaagtgctatatacttgtcttcatttccatttttttgttgctgacttgcgtgccaaggaaagactagatctaagttaggcagttcgtaataacatttgcgtttgggatttcaggtgctgctgcattaaatgtcataacatggtacttgtgggaacatctagtcttgttaattgccttttttcttactggaatttagtgcctttgtagattataaaaattattactagtactctgaaaatttattaaacaaaatcttagtgtctttcaaatacagaatagatgtaaaatttgatcaaatattaaagtaaaataagaaccttggataaagaggacgaaagtgtagaatgcagaaaaaaacattaaccctcttgtggacagtcaggattgaaaggaagaaaaaataatggcttacacttctagaatgctttctatgtggcagagacagttctaaatatttacatatcgtaactcattcacctctatgagataggagcaatgactatctccgttttacagatggagaaactgagtgcagagaagatatagaaattgtccaaactcacaaacaactaattaaggtcacagctgagattcaaatgcaggcagcctggctccagagtcttctcttttaatcattataccatgctgccatctcagttttattttaaaataataataggtaacatttattaattatttactatgtgctacatattgtgctaagaactttatataccttcatttcgtcctttcagaaaaggaacaaacagagctgggtgcactggctcacgcctgtaatctcagcattttgggaggccaaggcgggacgatcacctgaggtcaggagttcaagaccggcctggccaacatggcgaaaccccgtctctactaaaaaatacaaaaattagccaggtgtagtggtgtgcacctgtaatcccagctacttaggaggctgaggtgggataattgcttgaacctgggaggtggaggctacagtgagctgagatgtgccactgcattccagcctgggcgacagagtgacactctgtttcaaaataaaataaaataaaaaataaaaaaggaacaaagtattaggcataataatcatcaccagagagtgattttatgaaagacaaaaacaaggtggcaagaagagagaataaagttacataaagatagcatttaagaacaaccacaggctgggcatggtggctcacacctgtaaccctagcactttgggaggcctaagctggtagatggctcgagcccaggagttcgagaccagcctgggcaacatagcaaaaccctgtctctacaaaaaatacaaaaattagccagctgtggtggcttgcacctgtagtcccagctacttggaaggctgagatgggaggatcactcgaacccaggaagttgaagctgctgtgagcagtgattgcgccactgcactgcagcctgagtgacagagcgagactctatttcaaaaaaaaaggaacaaacccaataattttgggcataacgaccagagcacaatgagctacagagagctttctgagaagtatttgctaattttatctgcaaagataatacaagcataaaaatatatgtattcaaatgtatagatgtgtatctgcagtgagagcagagctgttcctcagtagtgggggtggctggcagagtgaggtagtgtgctttcaggaattgctttatttgtctgatgtgttctagaccaaagaccaacagaggggcttgggcaatcagacacagaatttttggcctttcacatttagaatcggttccttccagattcttggaaaaggtccatttgtgctttaggcatctagtgctattctgaagatgccttacaaaatgtatgctgaaataaccttctaccagggtgaattttcttcatttggagttctttgagttctgaccatttatgtatattgatgaagctaatgtttacttcttcatagaccagtggaaagaaaacgtagtaacatgtagttgcccagggaaagatgaagaactcaggggaccaagtctcccatctcaactccccataaaggtagtgatggaatgggatgatgttaaaaacacctcaactttccgtcctctttaagggaccgtgagaaggtagggatgttaccatactcagacttcttgctgagaaagctaagaaacaaaagcatttagtttttttcagtggcaggtgcttattaacgtttggcctatttgataaagggttaaagcaacaggaatgtgctactgctgttcccacaagcagtagtctaatttctttctttttttttttttttctttttttgagacagtcatgctctgtcgcccaggctggagtacagtggggccatctcggctcactgcaacctctgcctcccggattcaagcgattctcctgcctcagcctcctgagtagctgagattacaggtgcgcaccaccacgcccggctaatttttgtatttttagtagagatggggtttcaccgtgttgttcaggctggtctagtcttacccagtcagcagcagaaaggctctctgggctctaggtaaacacatgaaatttatatagtgtgtttaagtgtggttcctgtgcttctggagttggcacagtagtggtaccatttgctgtatcgacaacagtgggggtatagacgaaaaacagattgacacctctgaaagtatatatgaacacatgtcgatgcagcatttctggtgaaactaagcaaattgataaagttggcctagggtacaagacattatgtcatgtcccactgcattatgattaaacccaagattagaaaggagaaatgatggcaacagaaccagtttctccagctgtctattctcatgttcatcatcacagataggaaagggcagccggccctctgcatctgtgggcacatccctggattcagccaaccacagatcaaaaatatttggaaaaaaatgtagatagttgcatctgtactgaacatgtacagacttttttcttgtcattattccatacaaaatatagtataataactatttacatagcatttacattgtgttaagtattataaataatctagagatgatttaaagtatacaggagggctggccaccgtggctcatgcctgtaatcccagcacttttggaggccaaggtgagtggatcacttgaagtcagaagtttgagaccagcctggccaacatggtgaaaccccatctctactaaaagtacaaaaaaaaaaaaaaattagccaggtgtggtggcaggtgcctgtagtcccagctactcaggaggttgaggcaggagaatcgcttgaacctgggaggcggaagttgcagtgagccgagatcgcaccactgcactccagcctgggtgacagagtgagactctgtctcattaaaaaaaaaaaaatcatgaacaactctgcatgtaaatcaatacagagctgcattataatttacataggctgtataaaatcctgttgattagatgtaaaatgatttattaaattaattttctattattgggcatgaagataggttccaggctgggcacagtggctcatgcctggaacctgcctcccggtgctttgggaggcagacacaggagaatcagttgagcccaggagttcaagaccagcctgagcaacatagtgagacaccagctctacaaaaagcaaacaaaacattaggcagacagggtggtgcatgcctgtggtcccagctacatagaaggctgaggtgggagggtcacttgagaccaggagtttgaggctgcagtgagctatgattgcgccactactctccagcctgggccacagagtgaaaccctgtctcaaaaaaaaaacacaaaaaaccaaaagagataggttctgacttttcacaatagtgtatagagtttgatggagcagtcttatacatacttttttctgcgctagtgcaaacacctccttacaaatttctaacagtataattggtcataggaaagaaacatttttcaagcttttgattgccaaattgacgcccagaaaaggtatacctgtttctgctcctaccagtggccctacgaatgctcctttccccacattcacacccccaccgagttttatcattcttttaaatctttatttgccagtgttgacctcttctcttaaatgcctgtaacctcttcctgtttagcttctctcctaggtcagagagtgaactctgaagtcattctttagggattaaaatagtcatgcatttctccttttttctttgccttacatgcaaccataaatggtgagaacttctatcctttttcactttctgcttctgttcctttaataggtggattaatgataaaggtagattgttcaaacaacttagttatttcttaattttgttgtaagctctagttgccagactttaaactgtgctttttactttgcttaacaatgtaatccaatctacctcctcctttgggtgcctaagccatagcccttttaaataaaatagcaaatggaaaatcagaatccctttctatcgcaaaataagagtccagattacataactcattgtatgtgttttcacttggatgagagaatagagagtatggacctctttcatactttttttttaatgttccttttcctctagaattggtttctggggctaaaaggaaacagtagttagtaccactctgctcagaaacctcaaaaaacttcgacttctgtcattctcatcaaagggcaaaattcattgttcttctgtgatagagaccaaaaatacaaatagctaaactggaactaaattaagaaaaacagaagttaataaactccaccgcctcactcccatctcttcgtaagttagtaggcttgtaagtcctaggctggttagttcattcatttgttcactcatgccagccattgaggattattgtgttctaagtgctgtgctaagccccagaaatacaaagacaagtgagtcatgggcctgcctgcaaggagtgaggagatttactcaaaattgagagctggaaaaagaaaggcactttccctggcctcatagccctccgtgacttcaaagtattcctctctggggtcatgccactagggataatagcattatccaaaaacatttttggaaatccttttagaattattctcagggactggagtacatttatttttaaaaagaaacttggtgttttaaaatctttttttttttttagggagaatctgctttattatttgagaagtttcaaaaaatatagaaaatacagatgataatatggcaagtatctaaaggtctccacttaacagaattaacatctgttaacattttgtcacttttgctttagttgttttttttttaattaaaaaagagaacattacagataaatgtgaagtccctgttattctgttgcccatttctgttctccctgctgctccctgagagtactaacacaaaggtgtacttctggggtgtgtgtgtatatgcatatccataaacaatatatggtatagcttctggagggatccaaagtcattagcactcaagcaagcctattaaataaaataatatcagcttgagttaaagataacatatagccgtgaaataacggagctgatttttaggtaccttgtcaaatagttctgaaagtaattgcaaagaggagttccaaaagtgagttcagaaagacagctttatcagaataaattgcatggtactgcatacaggaaactataaagaacaacggttatttagaactgttcattctgacagtgtttttcaattactccttaatattataaccacttactcatttcctgaaatcaccaggaaatttttcaaaaagatttttctcccccgatgaatatacccacgatttgcatttgacccaagataagcagttgagtcgataacatgttaatttttaaatacatggttttaaaacacagaataaaaattctacctcattgcttggagactcaattaaggagagtatgcacattagcaaaaagaagatgtgatatttgctcagaagtcttgaagtggatattttggccttcgtatggctgaatggtcaagcttgactctctcgtttgctcagggaggcccagtccctctgctgccacgggtagaaatactttttcctaaatcgctgcttcttctcactgccatacagagcaatattcaggacacagccaaaaccttctttggcagacctttttgagttctctctactcagctttctgctgtgtaatatgagcactctagagaagttgggctgtcctcaggaaattacacttggggtctgtggttccccaggaagacaaactggagctccctaaggggtactagtcatcatacggcatttatactagcattgcagtccactttcacctatgcaagtagaaaaactcaggctcaaagtccactgacaatgcaggagtcccttatctgctggttaacataaatgttgttttaagatgatggccatctgttgtctgtgagaacaagactatcacccacctgttgacatgctggctggtttaatatcttactctttcattccaaataactacctggtctcacagatccccttagatggggtatccaatttacctcctgtaccttattctctgtccaataatttcactcaaatcaacaagatattttattgcctatgacttcctctaggtattacgggagattcaaaacacaaacagacaagcagcctatgccctcagaatccagctggggtgagtgggtgactataaatgcaaaagttagagagcatggggaacagtgtttgattgtgtggctggggaggggtaaggacaaaaactcagagagagagaagcctgtagccctggctacagaagggcaacacctctgaggagatgagtctcagctgggccctgaagggaggtgactcacagatgaaacaaacctggtgggaagaatagttagcagtgtgcagaaggcattggaagggattccaggggaggagtgaggagggagccacagtcattccgatgtgaggtagtgagatctgggattagactgggtcatcagaatggaaaaaaagggcctgcttctgcagacagtttaaaggaatcagctggatgtgggaagcaactacatacttattcattcattcatttcatgcatattgcttatagcctactatgtgcctagcactattctaagtgctgaggatagagtcatgaataagatagacagggttcttattctaaaaaaagtaatataccagtggggagacaatgaagaaataaaccactaaataaacaaggaaacatcagataaaataagtgtgatacagagaatgtaaacgggccattgagagggcatggattctttagatgggatggtcaaggaaagcatctcttagagaaaaacctctgagccaagatcaagcaggggaatgacgaagcacatgactgaggcaggagtaaatttgatgtgttggaagaaaagcaagaactggtctgtctctagtggagtgaatgaggggagaggaggagagctgaagagggaagttagcaaagaacgaatcacataaaagccttaaaggcaatggaaaaaatttaaatgttattcaaagtgcaatggtgtattagtccattttcatactgctatgaagaaatacccaagactggataatttataaagaaaaaaaggtttaatggacttacagttccacatggctggggaggcctcacaatcatggcagaaggtgaatgaggagcaaaggcatatcttaaacggcggcaggcaagagagcgtgtgcaggggaattgccctttataaaaccatcagatctcgtgagacttattcactatcatgagaatagcatgaggaaaaacctgcctccatgattcaattatctcgcacaacatgtggggattatgggagctacaattcaagatgagatttgggtggagacaaagccaaaccatatcaaatgggatggtttatggagcagggcatgatgcgattgacttttgtgtttaaaagatctattgtacaaagaagcaaggaaaccagctgggaggcagtggagaatccaggggaaagatgacgatggcaaaactagagagcagagctgagaaggagagaaccaggcagctctgggataacattctggagctagggctgacgaattagatatggggtggggcaatgaaaaacaaaaaaaaagagaaatcaagatgtctccagggttggatattgatgcttttaacagagattgaaaagactggaggagaagcaggcttttagggtgaatcaagggtttaactggggacatatggagtctaagatgcatgttagacattcaagtagaattagctactatgcagttttatttaggaatctgaaactcaggggagaagtcaagactggatatttaagtttgcaagtcaataccaaacatatttttacataagaaggaaaaaatattgatatgattttgataagtttttaatagccagaaagctatatgcgtaatatggtatcattttaattaaaaaataaatatatgcataactctctgcagagataaatgatcaatacatataacaaggagagaaccagaaggacatacgccaatatgtcatgagtgttatctctgggtagtagaattattgatgacttttgtgtacttgggacatgcatgtatgagtgtatgtatgcatgcatattttgcaagttttcctcaaaggatgcttttgtaattggaagaagaagcaattataaaataaatggcacaagatttccatcctggtcaaatgggataaggatgatgccaatgagaaattatgaaaattggaaattagacttagttttggggggatgattttttacttccctcgtagaggttttgtttaagacgatgtagtagactgtacctttacatatatttgctgtccctcccgatgggaggattttacttttcacctgttgaaggtgatgtggtcacttggaggtgaagagatagcctggactttgtcacattatctttctcctattctaaacaatctgcagcgttccaggtggtggatgatctgtcatcctgcatcctggagtaaagatgattaaagcagagctgcagctgccctctgaaggcctttgtttttgtaaaccactgagatttttgaattgtttgttatctcaccataacctagcccaccctaacacagatgaacataaaatacagaacatttctattgggcggcttgaaatacaggcttggggcatcagtggtaggtcagcatggaaaatgttgattaaaaagtcatctgtgaggtggagattgggactgaagaatggataaattttctgaatggaaagtataaggggaagagaagaggaatgggcctagaggaagagtcactgtcaatccatacaaaaagaagagatacgaaaagataggaggggggatttggccaacacatggcagaccgttgtagtatcagaaaagagagctaggagggtagttacaaagatcacatgccaaattatgagggcaaagagccattggatttaccctgaaggtggtcattgaaaacctctgaattagcagttttagcggagctgtggggaaggaagtcaggtttcataaggttatagagggagtccatgcagaggaaatagaggaagctggtggaggccactcctttaaaaagcctggatgaggccgaagagaaatgggacaagtggtaaccagaaggcccctacaaggctgtgacttttacacaaatatgacatacaatgctgaacaaaggatgtgctgatcttacagaggaaggatgtgttttattcccaaaaaaaactttacatatgggtaaagttattcaagagaccctgtgctgtctaatatgcaacaaatttttctttgcaccagcattaagacttctaacaataagtaaaatattctatttagatactttttacaggagattttgaaactctgatgacactgacatactacctttcagaacatggtactgtttaaaattttattatttttatatttatcttcatatgtttaaatttgaaaaattacaggaaagagtacttttataattatgtttttctgtttacaaaccacctcctgtgtgctgaattttgcctccccaacatttttcaggggagcatggccctactcgcactttgagttcagatttctggccttcagaactctgagaaaataaatttcttttgttttacgctatccagtttgtggtagtttgttacagtagtcctgggaaactaacaaaccaccccaaagtttagtgacttaaaacagccattattatttctcacaattctgtgggttggcaatttgggctgggctcagctggacagttattctgctggtcttcctgtagacattcacatggctgccattatcgggtggctcaagtgaagctgtagggtctaagatgggctcactcacaagtccaggaccttggtgctgactgttggctgagctttccctcttcacacggtctcttgttgttcagaaacctagctggtcttttttgcattcttagctggtaaagggaacattctaagagaaggaaggtggaagctgcaaggcttcttgaggcttaagtctagaactctccaacgtcacttccaccacattcattggttaatgcaagtcataaggcaactcagcttcaaagagtaggagaatagaatcaacctattgaaaggaggggctgcaaaatagttggtcattttaaccaaccacagcacccaaccaaaaaaattaatactatcccgtttcagatttcagaatgtttaatcagaaggccttgtctttccctacgtatatcacaatacccattttagtggcagagaaactgagaccaaataaaactgactcctttaaagttaccaagtgagtcatgctttgtgagagacatgaagacaactatatgtctggaagagctaaacatagtcctgcctggaggcaggtatatgaacttaataatcccttgagatgctcttaaatcccataattacactgatggactccagattgcagagctgtctggtccagagataaagcagcggtttgagagtatcagagagagaaggtgcctgaaaattgccacatgtccccaaaggcaggatttgaggctaaattaaatgataaagagttaccaagctctttattctcaagagttaccaaataagcttagaaactcaatgactgctgctgtctagtgttagttctggaatgggagaattaaaaatgagtagaaaaagaaaatagagacagagagactaacatatctgaaagataggtgctgtgggcagtcttagaaggatcacccctatatcaattaggattgcttttagctgctgcaagtaacagccaaccaaaccatccaatggtttaaacaaattaggggtttatttttttcttttcatttatttatttatttttaaatttaattttattattattattatactttaagttttagggtacatgtgcacaacatgcaggtttgttacatatgtgtacatgtgccatgttggtgtgctgcacccattaactcatcatttagcattaggtatatctcctaatgctatccctcacccctccccccaccccacaacagtccccggtgtgtgatattccccttcctgtgtccatgtgttctcattgttcaattcccacctatgagtgagaacatgcggtgtttggttttttgtccttgcgatagtttgctgagaatgatggtttccagtttcatccatgtccctacaaaggacacaaactcatcatctttatggctgcatagtattccacggtgtatatgtgccacattttcttaatccagtctatcgttgggcatttgggttggttccaagtctttgctattgtgaatagtgctgctataaacatacgtgtgcatgtgtctttatagcagcatgatttatagtcctttgggaatatacccagtaataggatggctgggtcaaatggtatttctagttctagatccctgaggaatcgccacactgacttccacaatggttgaattagtttacagtcccaccaacagtgtaaaagtgttcctatttctccacatcctctccggcacctgttgtttcctgactttttaatgatcgccattctaactggtgtgagatggtatctcattgtggttttgatttgcatttctctgatggccagtgatggtgagcattttttcatgtgttttttggctgcataaatgtcttcttttgagaagtgtttgttcatatccttcgcccactttttgatggggttgtttgtttttttcttgtaaatgtgtttgagttcattgtagattctggatattcgccctttgtcagatgagtaggttgcaaaaattttctcccattctgtaggttgcctgttcactctgatggtagtttcttttgctgtgcagaagctctttagttgaattagatcccatttgtcaattgtggcttttgttgccattgcttttggtgttttagacatgaagtccttgcccatgcctatgtcctgaatggtattgcctaggttttcttctagggtttttatggttttaggtctaacatttaagtctttaatccatcttgaattactttttgtataaggtgtaaggaagggatccagtttcagctttctacatatggctagccagttttcccagcaccatttattaaatagggaatcctttccccattgcttgtttttgtcaggtttgtcaaggatcagatagttgtagatatgtggcattatttctgagggctctgttctgttccattggtctgtatctctgttttggtaccagtaccatgctgttttggttactgtagccttgtagtatagtttgaagtcaggtagtgtgatgcctccagctttgttcttttggcttaggattgacttggtgatgcaggctcttttttggttccatatgaactttaaagtagttttttccaattctgtgaagaacgtcattggtagcttgatgcggatggcttgaatctctaaattaccttgggcagtatggccattttcacgatattgattcttcctacccatgagcatggaatgttcttccatttgtttgtatcctcttttatttcattgagcagtggtttgtagttcttgaagaggtccttcacatcccttataagttggattcctaggtattttattctctttgaagcaattgtgaatgggagttcactcatgatttggctctctgtttgtctgttattggtgtataagaatgcttattatttttatacattgattttgtatcctgagactttgctgaagttccttatcatcttgaggagattttgggctgagacaatggggttttcaagatataaatcatgtcatctgcaaacagggacaatttgacttcctcttttcctaattgaataccctttatttccttctcctgcctgattgccctggccagaacttccaacattatgttgaataggaggtgagagaggacatccctgtcttgtgcccgttttcaaagggaatgcttccagtttttgcccattcaatatgatattggctgtgggtttgtcatagatagctcttattattttgagatatgtcccatcaatacctaatttattgagagtttttagcatgaagcgttgttggattttgtcaaaggccttttctgcatctattgagataatcatgtggtttttgcctttggttctgtttatatgctggattacatttattgatttgtgtatgttgaaccagccttgcatcccagggatgaagcccacttgatcatggtggataagctttttgatgtgctgctggattcggtttgccagtattttattgagtatttttacatcaatgttcatcaaggatattggtctaaaattctcttttttggttgtgtctctgccaggctttggtatcaggatgatgctggcctcatcaaatgagttagggagtattccctctttttctattgattggaataatttcagaaggaatggtaccagctcctctttgtacctctggtagaatttggctgtgaatccatctggtcctggactctttttggttggtaagctattgattattgcctcaatttcagatcctgttatttgtctattcagagattcaacttcttcctggtttagtcttgggagggtgtatgtgtcgaggaatttatccatttcttctagattttctagtttatttgcaaagaggtgtttatagtattctctgatggtagtttgtatttctgtgggatcggtggtgatatcccctttatcattttttactgcgtctgtttgattcttctctcttttcttctttgttagtcttgctagcggtctatcaattttgttgatcttttcaaaaaaccagctcctggattcattaattttttgaagggttttttgtgtttctgtttccttcagttctgctctgatcttagttatttcttgccttctgctagcttttgaatgtgtttgctcttgcttctctagttcttttagttgtgatgttagggtgtcaattttggatctttcctgctttctcttgtgggcatttagtgctataaatttccctctacacactgctttgaatgtgtcccagagattctggtatgttgtgtctttgttcttgctggtttcaaagaacatctttatttctgccttcatttcattatttacccagtagtcattcaggagcaggttgttcagtttccatgtagttgagcggttttgagtgagtttcttaatcctgagttctagtttgattgcactgtggtctgagagacagtttgttataatttctgttcttttacatttgctgaggagtgctttactgccaactatgtggtcaattttggaataggtgtggtgtggtgctgaaaagaatgtatattctgttgatttggggtggagagttctgtagatgtctgttaggtctgcttggtgcagagctgaggtcaattcctcggtatccttgttgactttctgtctcactgatctgtctaatgttgacagtggggtgttaaagtctcccattattattgtgtgggagtctaagtctctttgtaggtcactaaggacttgctttatgaatctgggtgctcctgtattgggtgcatatatatttaggatagttagctcttcttgttgaattgatccctttaccattatgtaatggccttctttgtctcttttgatctttgttggttgaaagtctgtttcatcagagactaggattgcaacccctgcctttttttgttttccatttgcttggtagatcttcctccatccctttattttgagcctatgtgtgtctctgcacgtgagatgggtttcctgaatacagcacactgatgggtcttgactctttatccaatttgccagtctgtgtcttttaattggagcatttagcccatttacatttaatttaatattgttatgtgtgaatttgatcctgtcattatgatgttagctggttattttgctggttagttgatgcagtttcttcctagcttggatggtctttacaatttggcatgtttttgcagtggctggtactggttgttcctttccatgtttggtgcttccttcaggagctcttgtagggcaggcctggtggtgacaaaatctctcagcatttgcttgtctgtaaaggactttatttctccttcacttatgaagcttagtttggctggatatgaaattctgcattgaaaattctttcctttcagaatgttgaatattggcccccactctcttctggcttgtagagtttctgccaagagatcagctcttagtctgataggcttccctttgtgggtaacccgacctttctctctggctgcccttaacatttttcccttcatttcaactttggtgaatctgacaattatgtgtcttggaattgcttttctcaaggagtatctttgtggcgttctctgtattttctgaatttcagtgttggcctgccttgctagaatgggggacttctcctggataatatcctgcagagtgttttccaacttggttccattctccctgtcactttcaggtacaccaatcagacgtagatttggtcttttcacatagtcccatatttcttggaggctttgtttgttgctttttattcttttttctgtaaacttctcttctcacttcatttcattcatttcatcttccatcactgatacccttttttccagttggtcacatcggctactgaggcttctgcattcatcacgtagctcttttgccttggttttcagctccatcaggtccttttaggacttctttgcattggttattctagttatccattcgtctatttttttttcaaagcttttaacttctttgccattggtttgaatttcctcctgtagctcagagtagtttgatcgtctgaagccttcttctctcaactcatcaaagtcattctccatccagctttgttccattgctggtgaggagctgcgttcctttgcaggaggagaggcactctcatttttagagtttccagtttttctgctctgtttttttcccatctttgtgtttttatctacctttggtctttgatgatggtgacgtacagatgggtttttggtgtggatgtcctttctgtttgttagttttccttctaacagacaggaccctcagctgcaggtctgttggagtttgctagaggtccactccagacgctgtttgcctgggtatcagcagcggtggctacagagcagtggatattggtgaaccgcaaatgctgctgcctgattgttcctctggaagttttgtgtcagaggagtacctggctgtgtgaggtgtcagtctgcccctactggggggtgcctcccagttgggctactcgggggtcagggacccacttgaggaggcagtctgcccgttctcagatctgaagctgtgtgctgggagaaccactcctctcttcaaagctgtcagagagggacatttaagtctgcagaggtaactgctgtctttttgtttgtctgtgccctgcccccagaagtggagcctacagaggcaggcaggcctccttgagctgtggtgggctccacccagttcgagcttcccggccgctttgtttacctaatcaaacaactaactcggcaatggtgggcacccctccccaagcctcgctgccgccttgcagtttgatctcagactgctgtgccagcaatgagcgagagtccatgggcataggaccctctgagccatgtgtgggatataatctcctggtgtgccgttttttaagcccgttggaaaagcgcagtattagggtgggagtgacccgattttccgggtgccgtctgtcaccctttctttgactaggaaagggaattccctgaccccttgcacttcccgggtgaggtgatgccttgccctgcttcggctcacgcatgttgcgctgcacccactgtcctgtacctactgtctggcactccccagtgagatgaacccggtacctcagttggaaatgcagaaatcacccgtattctgtgtcgctcacgctgggagctgtagactggagctgttcctattcggccatcttggctcctccccttatttatttttttcttacataacaagaatgccagtggttggccctgcaggcttggtgtcatggcccccaaggtaccactggagactctggttctttgtgtctttgtgtcccaccaaccttagtgtgtggctttcatccttatggtcacaggatgactcctaaaactctgtacagtgaatcagtattggagacaggaagaagaaaggaggtaaaaaagacatgccagctaactttgctcccattaggaagctcttctagaagctcacagaattacatttgtttatgtatttcattattcagagctgcgttagctttgtctacaagggagattggcaaatgtagttttcattagcccagcacattgtcacccccaacaaaactagggttgagttagaatgaaggggctagtgcatattgataggccactagtagtttctacacagcctccaacaattgctgtggatgtagattagtaacagaacttccactatggcatcatagcacctctatcccactagtacctgtagtaggtccaaatcatctaattccaggagcctggcttaaagaagaggaatattgaggcttctaggtccagtattaatcaaggtaagctagctgtgagaacaaacaatctcaaaatctcagtgaacgaaaccaacaaaaacttgtttcatgtttatatcacagtctgatgcagatcgagtggttctcctccaagcagtgactcagggacccaggctgcttccatcttacagctctaccatcttgtgactttcagattatgttggcatcattcagccagtgactaggaagaagagagaatgaaagattgtgcacccaattcttaaatacctccactcaacactgggacacatagcttctactcacacttccctggggaggactgcttacaagattcatcaatctgcaaggagggctgggggaatatattatagttcttgcctggcggcacttccagcaggaacacttcactatgaaaagggagcacaagtctttggggggacagctagccttctgtgccacaaaagcccagtcacaaagaaaaagccattaccaaaatgttccataaacaatgtagacctactgtggtttgctgttgtctgatagataaaaactgtgttgttttagtcacaaggatttggatgtgggagctgcaaggaaagcaaaagccaaacaagtacagctgaagcacctgagatcctaggaggagacaagaagaatacaaggtgccattgtcctatcagccaggcagaaagatggtaggaaacaaggccatttaaaatctaattgcaattgcaagggctgggtgctgtggcttacgcctgtaatcccagcactttgggaggctgaggcaggtggatcacttcagctcaggagttcaagaccagcctgggcaaagtggtgaaacctagtctctacaaaaaatacaaaaattagccaggcatggtggcatgcgcctgtagtcccagttactcaggaggccaagatggaaggatcaattgagcctgggaggttgaggcttcagtgagctgtgattgtaccactgcactccagtctgggtgacagagcaagaccctgtctcagaaaaaataataataaaataaaatctaattgcaggcaaggccacaggaagtggcaagtgcaactaaagacttcctagaaatcccacacattgataagcagccgggttgttcagccagtttttttttctgagaacaaccaattttaaaatattttaggaaaaaccacaatattgagatatttttaaacagcttatatttaaacagcatatatttaaacaaagtgattaatttagaattcatattttatttgagaaaaaaacaagatgttcctggtctggcagatgacattctaaattattcactcccacttgtggaatagctgagttatagtccggcccctcctctgtagaggaggatttataggagaagatgagtcacgttactttttgtgactatttttctttgcatttgttgactcctcttgttttattcaccttctaatcattgaataatctgtacaatcagactgccttattcatgttggcagttgttttaataataacaatgcacagagccattgctactaacagaaagcagggcagacctttgagtctgagtttggggatacaagtttgattccatcccagctccactgattcccagcgagatgtggttcaacatcataggaccaaatgaaataaaaagcgtgaaaatgctacacaaatcaaagagtgctaaagacatattaatgaaacatctgtaaaatgggaataagtaccacgtttctgaggtagcatgtaatacaactggcacagggttccacacttggtagatactcaaaaaagaaaataaaaagttaacatggacaaagtaaaataaactggaaataggagatggagaaatgttaaaacaacaggcaccataataatgtaaagtaggatttcagctcatttacaagcacagaggttatatggtaagtcctcacttaatgttgtcagtaagttcttggaaacagtgtctttatgtaaaacaacataaaggaaaaccaattttgccataggctaatggatataaacaagagttaagttccagtacatatgtgatggcatatttccagttacaaaatatcaccaaacttctaaataaagaccaaaagactcctaatattaaacattgaaataaatgtgagctatactttcatataagaaaaattaatgcaaacaagtacaataattatttactgagttattccagttcggggtcgtggatggccagagtctatcccagccgtccagggccaagtttggaacccaccctggccaggacgccatcctatcacagcttgcactcacacacactctcactgggaccatttagacacaccgattcacctactctgtgcatgtttgggatgtcaaggaaaccggagtaccctgagaaagcccacatgggggaacatgcacactccacacagacggtggctccagccaggaattgatttattttctcatcaatgttataactaaatgactttgaatgaaacaatgttatttgataacctgctgtatttagagttcacaaaatttatccctctgaaacacatacacacacgcatggccgcacacacacgtgcatgcacacactgcacacacttaatgctaaacttgaaagagatttaaaggctaaaaggaaagttggactttaaatttcccctggagctcacattttctgggtactgaaagatatggtagatacatatgattgccttttccaaaaataacttctatggaaaatcctgagagttataagagactacaaaggtgatttgatagagccacttaagtaatgtatgcaatatgatcaccaggtatacttgtatgagagatgggaaagaaaggaaatattgaaagagcagaaccatgaaggagaagaagcaattgatcctgaagaatagcaactgtagtcagggattagagacctgcaaacaagtttcctattcttttcaaaaatgaagaatagcttcttattacaaaagctgtatatataaattatagaaaagtcagaagtgcaggtaagcaaatactttaaaaatcaaaattatctctaattctttgacttattaatcattttaacagcttgattgatattttttcagatacacacatacatacatacttctacaaaactggaagtatgcttatatattgtatcataacctgcttttttatttaaaaaatatcatgaacaacttttcatgtcattaaatattgttgcattacatttctaatgaatgcataacattccattgtaaggatacagcgtaatttaactcagtctgtattgagctacattgatttccagttattcacattagaaacagtacaccactgaataaatttatgcattcatctttgcttacctctttaatgattcttcacgataaatgctagaaatagaaccacagacttaaaggtctccattgatatgtgtggctcccttgttttcctttgcaaggttttgtgtggcatctgcctttaaaaggttaaagatatttttacttataacatccctgaactttacctcaagtcttggggaaagttattgaaaagtagtttgtattcaaataagtacaaactggcaaggtcaatcttttatacaggttatcagaaacaaatcaacctcataagatggaactaaacccattattatgattgagtcagcaaacttaaagatgtgtttggtttggacaaatactattaattccttaagttccctgtggccacagtttttttttttaatgaatgtttttctgagtaatcttggtcctatttgaggccatcttcatatgcactaccaatatttccagctatacccaacaggtaaactagccctctgtaggcaattaaatgtatattttcctgaagaaagtaaggttatatagaatataagtataaggtcacctagaagagctattaatgtattatggacaatttctttttattgccagagctacatgttacttatatttaagtctgatatttaattctctattatattcccttattattgaattaattaattcatccattcatatgacagatatttcttgagcacttacttgtgccaggcactgtgttagactctggggatttggaaagaccctgcttccctcatgaaacttacattccaatgatggaaacagatcatctgtaagtgcgtaaactaatatatcatgtcagataatgtctcatttccttatctcttaaataaaaaaatattctattccatagggctgttatgagaactgagtgagactatgtggaaattaccatacacatgtttaaaaaatattgtttctttttcctcttatcttttagaaaagggaaaatgattattgtttctttttcctcttatcttttagaaaagggaaaatgatttgtataaatcattaaatactcccttgatattacaaaactagcaaattgttttttgattttattttttaaattgtcacataataattgtacatattcatggtggtacatagtgatgttttggtacatataattatagtgatcagatcaggacaattagcatatccatcatctcaaactctaatcatttctttgtattgggcatgttcaatatcctccctttaagtatttgaaacgacacaatacattattgttaactacctcatcccacagtagtatagagcactagaacgtattcctcctatgtagctgtaatttcgtatcccttaacaaatctctcccatctttcccttccccctacccttcctggcctccagtaaactctgttctactttttacttctatgagatcgaagttttttagcttctgcatgtgagtgagaatgtgaagtgtttaactttctgttcctggcttatttcacttggtgtaatgtcctccatttccatccatattgctgcaaataacaggatttcattttttaatggataccattccagtgtgtatctatcccacattttctttatccattcatttattgtcagacacgtaagttgattccatatcttggctattgtgaaaatgctgcaggaaacatgggggcgcagatgtctcttcaatataataatcttttcctttggataaattcccaggagtgggattgctagatcatatggtagttctaattagcaaattctatattccatattaaaggaaggaataggtaaatttttttcaaattttttattttgttaaagatggagtaatcctcccacttcagcctcctgagtagctaggattacagaggtgagccacagcacctggcatgggataggtaaacattttttaaaatgtttgttttgtttcaggcaaaattaggtatcaactgtttctccacaaagaagagcagcttaagccttcacagcacatagttctgataattcaggtcttcttttgccatttctcaaacatagctatcttgtgttggtacatgcgatctgcagggccttagacgaatcatacatttcatctctctgggcctcagtttcctgaagatgaagttatgttatatggttcgtaaagttcatttcagggctaacttcactttgtccttgtaaaaattatctgcctagtgggtccactccccacctcaccaccccccaaaaaatgactgctgtgctccaacccaagccaatcaaaaatgataaacacttgactgtgacttttttcaagactctgttttacagagaagtggaaaggtctactgtggaatgcttatattttaatttgtcctcattgataggagaggacaaatgtaaactaggagaaatggaaaaaccagtgatacatgtcttgttatgttaaaggaaaaagctagagacaatatgattattaataattattttttaaaattaattcttgcatttattgagcacctgctgtatccctcatatgcattaccttgtataagtcttgtaatagcccaaaaagttaagagtgttcttattctcccaaggatgcagatatggaaactgaaactgagtacggttatgcagtatgtgaggggcaatgctgccacagaaactcaagtctagctgagaccaaacccatgtttttaaccacttgcttcttgcctttgccaatcattgccaccaacgagtcaaaacttacttgttgctggaacatggtttcatcctggccttccacggaatctgttgagcttgttttttttttttttccatatgccataatatgtttagtttcacctcagatgagacagaggatttactttcaagaaagttggacgctgtccactctaaacagtaccagaggtagccttacagcatcagaaaatcctgtggtagtatctcttcatcggaacttggaatatgattttaagagttttttctatcttttcattagagcaggccaacactgacttgatttttctctgaaattagctgtggacaaagattccttttcaaactaaagattctaagcttattttcccccatcactttatcaaaactagaaacaatccattaaaaacactgcccagccttcaggggcttaatcaactcagtggtataaagcatgaaacttgattctgagatccaggagagaatatttggattgccgggaggtgacctttatatgtttctttacgtgtataacaaatacatttcaattcgcgtctagccccttaaaaccagtgcatgtttctgaccctgagtgctactgacattgtgaatcgcactgcaaacagaacacgggtcactgttgttttcctgatctgggaagacatcatggtgtggtgaaagggacagtgcgctgctgatcagacttgggttctgtctctcctctgctaccagtgaaatgaatttcagatgcaaagtggaaagatcaattgtttcttggcctctttgctgagatcaagggaagaagaaagatcagattagttccgtgacagtccaatatttactgactgacccatgttctgtttcatctcaggatttccagggggctccaatttggaccactgcagcggtcccaactgccaacctatgttttcccttcttccctacctttcccctgcagcctcaagtggttccagataaagtgttattccatgtatctcactgtctgaatctagaggactctgatacccaaatgtgtttctcagagtgtgtcaatgaaagggactctttgacccacaatccccctttttcttcacaactccatcatcggcatcctcaaagacaatccatggtgcctactactcctcatcttattgacatgattttaatgtcagctctcgccgggcgcggtggctcatgcctgtaatcccagcactttgggaggccgaggcgggcagatcacgaggtcaggagatcgagaccatcctggctaacatggtgaaaccccgtctctactaaaaatacaaaaaaaaatttagccgggcgtggcggcgaccgcttgtagtcccagctactctggaggctgaggcaggagaatggcgtgaacccgggaggtggagcttgcagtgagcagagatcgcgccactgcactccagcctgggtgacagagccagactccgtctgaaaaaaaaaaaaaaaaaaaaaattttagctctcaaagttttcctccatgttccatgaaaatacactttacaatctagtattccccccaccacacacacacacacacgcacacacatatatactgaaacgaaaccatatccaacttcatttccatttccaattcattcaacattttctattctgttctattgcatttaaaaaacgctggtcacaagccactaaactgatctcagatcagactttaataaatcagactcccccttttatacgcacagagcactctctactgtttcttcctagtacttgtcacaatttgtaagtcctaaatcatgtgattgcctacttaatgtctcccgcaacctgcccctggtgttctgtaaacttcaagaggatatgttttgctcacctttgaatttttagatcccatacaacacctatcatatcataaatgtttaataaatatttattaaaagaattaataaatgaatgtggccaaacctattcaggtctgcatggttcctccctagagttccatcacacttcacagatctaaagtttcctcccagttgtggaggtttgaagctcaaaactgctggaggtgcttcccaccatagctcgtgaaggccctattggtgttttcttcctagtccgtctctagttgatcatgacagatgggccagtgtgttttgaagaagactggctgatgcctcaccaaattctggggacaggtgcctttctccaggggaattcatgaagagactctccaggggcagggcagaccactgggaaaaacaagacccttgggttttctgaccactggccacttgtttttcccacatcaggagagtttatcatctgtgctcatccacctcctgaggttgctttgctggtgctgatttcaggtcccaggcccctaaggtctcacactcactccacaagccacctacacagctgtagttgttttcagccgacagctaggttattttgccttccaagatattttcttttatttatttattcatttatttattttttgagatgaagtctcacactgtcacccaggctggagtgcagtggcacaatctcagctcactgcaacctccacctcctgagttcaagtgattctcctacctcagcctccccaatagctaggattacaggcaagcaccaccatgcctggctgatttttttgtatttttttgtacagatggtgtttcaccatgttggccaggctggtctcgaactcctgacctcaggtgatctgccctcctcagcctcccaaagtgctgggattacatgcatgagccaccatgcccggccaatagtttcttttttgataggcagctcttaaagccctcagaatacatctctaatgatgaaatcatcaggcaacttgacaaagagtgaagaaattgaagggttctctcaatagcatcccaaggaggctgacccacaccctactgcctaccataggctggcttcatgtgctctagtgctgtgaataaaggaaaaaactaacatgttgaagcatttatttagtgccaggaggcaggtactttctcagataccctttttcttctcacataattccaggtcattggcagaatagagatgcaaaccaagaacttgggcagcaccaagatgtagatgctaaaactttaaacttgctggacaaaatgataggggactttgaaataattattcagacaatttaggcaagcaaacaaaagcaattaaaaattgggcatctggctgggcatggtggctcacacctgtaaccccagcactttgggaggccaaggagggtggattgcctgagctcaggagttctagaccaacctgggcaacatggtgaaacctagtctctactaaaaatacaaaaaattggccaggcatagtggcgtacctgtagttccagctacttgggaggctaaggtgggaggattgcttgagcctgggagatggagcttgcagtgacctgagactgtgccactgcactccatcctaggtgacagagtgacacccatctcagaaaaaaaaaatgggcatctggccaggtgtggttgctcatgcctataatcccaacactggaaggccaagtctggacaattctttgaagccaggagtttgagaccagcctgggcaacatagcgtgaccccatctctacaaaaaaattaaaattaaaattaaaaacagccagacatggttgtgagcacctgtagtcccacctactagagaggctaaggcaggaggatcatcaaaactgcagtgagctaagatcgcaccactgcactccagtctgggtgacagagtgagaccctgtctcaggaaaaaaggaggcatccaaaaaaatgttcccttagatccattttttgtctgacagagacaggagaggtgatgaaagggaatgtaagagtatttaagggattatttctttatggtagcagaaggacaaagacatgtttgaaaaatttttaatattgtataaaatgatgatattttcttagtggtcttgttgttgaatccagagattgtggtcatgtagttcataggtaatttatcagttattatttattttttaaagcttttatttatttatttatttattttagagatgaagtcttgcaatgttgcccaggctggcctagaattcccgggctcaactgatcctcctttctcagcctccctagtagctgggactataggcacacaccactgtgcctgtctaatttgtcaacttttaaatgagatcatctgcaagttcaaggaagttagataaagggtgataccacagaaaaaaaatgagatttttctctttaagatgaatattgaatttagaattccttaattaatattgaggatcacatgcgagctacagatagggaatattgagtatttaaagcattctgaatgacctgagtgttttccttctcatgcttattaaaaacatttaccacttacagctgaattggaatatagttctacataaattgttatttacacctgatacacagaaagaaatgtgtttccttatttatcatactattaatttgaatgtgctattctttttttaattgctttaaagtcaattggggaatcagattatgaatatctattttactgcttccacatttcctaagttaatcaaatacgacaagttagtgagcttgtggaatttacttgaatttcctaatcttttaactgagagggtattttcgacagcaaatattttgtagcatccatttgtcattttttaaatattcaaactagttttttttaaaataatgccaagtacacttagtgcctagtaaatgctggccactgttattgctgttatcattattcttttttgtttgtttgtttgagagggagtctcgctctgtcgcccaggctgaagtgcagtgacgtgatctcggctcactgcaagctccgcctcccgggttcacgcccttctccggcctcagcctcccgagtagctgggaatacaggcacccaccaccacgcccggctaattttttgtatttttttttagtagagacggggtttcatcgtgttagccaggatggtctcaatctcctgacctcgtgatccaccctcctcggcctcccaaagtgctgggattatggcagagaaatgtttgtttcaaaagtgtgttagtctctaaggaaatgaatacttccagactaaattctgtttatagtattatcattaataaataaactaaaacattacttctgtttcattgccccaatgtatattgtattaaaatgttcttttctgatcttctctaagttaaaaaaaaaaaaaagaaacaaagttgagtaaacaagctgagcaaactttgtgttgaaactttaatatgtccgaggaaaagaatcttgcattaagtccaatacagagagtctgataatttggtggagcagagagcctcatctgaggtggctttccgtgaacagcatctctgaggtgtcacctgctaccacattcactgtccaccctgggctttgcccctcaagcaccagggctcaggtctcttgttttgcctgtttctccctatagtctccctggcctgtgccttttagacaaaacagattaacatcacctttaagccgtcaatactgaacattctgtctttataaggcctgactcattaccaattttatttggtcaattttaccttccttgctttcaaaggaacaccatttgcctatgtcaagtgttctctttcttttatttttcccttccttctgtctttcccctccttccttccttccttcctccctccctcctctctcctctctttcttccttccttgcctccttccatccttccctccctctctctctttctttctttctttctctctctctctctttctttctttctctctctctgtctttctttctctctttctttctttccatcttcttttctttctatctttcttacttttgatgtagctgtcacgacctaatgaaaatactggcatgagtgatgccacctttagattctccaccttcctgttcctgtcctattcaccaacatgaattggtttgtggctgtaagtacttggtgggttattgctcatagattcagttgcatttttgctgagatagtgctgttaccaaaagcaggggtgctgcttgaagaagtaaacctaactctgaaaaatagagactctccagaaacatcataatcttaaggatggacatttgtggcctgttattgttacttcattctaggtgacagagtgaagtgagtgagggcaaaaatgactgcacacttatggaaagagggctgcctccaccacagacaggtagtgggaggtcccactcttccaggttgaacccaatatcctatcttctccttccgctcttggtacctgttgttgctattgtaaacacttccctcacctgggactgcatatagatgaaagattgctggggggtttcccaggatcttgggccagtgccaacaaatggcaaactttcaagtctagagatggtcctatggcatgactgggggacaccacttccttcaccagaacattcacatccttcccaaggtgccacgcccagttcttttgtccaacaataaactctgcgaagtggagtgaagtcaccacccaagccttagcctacctctgaccacagcctgtgactccacaaagataaatgaaaagaggaaagtcagtgatgttttctatactgtcagcagcaatctcacagcctcaatacattttctttcaaaagtttaatatgtaataactggcatttcttcttcattcctagttggttagactgcatcacatctgccatgccaaactattaagagtaatacaattcttactcttagtttattaagagtaaaaactattactcttaatagtttagcatgctattactcttttcttattttttaatttttttaattttttattttttgagacggagtctcgccctgttgcccaggctggagtggtgcagtggcacaatcttggctcactgcaacctctgcctcccaggttcaagcgattctcctgcctcagcctgccaagtaactgggattacaggtgcccaccaccatgcctggctaatttttttttttttttgtatttttagtgggcaaggggtttcaccatgttggtcaggttggtctcgaactcctgacctcaagcgacgcccccgcctcggcatcccaaagtgctgggattacaggcgtgaactgctgcacctggctgacgtgctattactcttacagcatctggacaatccctaacagtctgaaagctctataatgttgcaggtagtccaaaggccctatcccttattctagaacacaggctttatagcacaggctttggcaagtctgtaacagtctgaactcctccactgtattccacatactagggatcttttaagttgtcattatgtcctggcacaagcatttatcatatttctgggagcatgtagggttcaagatgcgagggcaagagagggctgagttgtttgttattaagctgacaggaaatggccaaggctcatgtgctactgcttgcagttgggcaaaagaggataaattaattgctttgtagaaattcctttctgcattctttagggaaaatttttccatgtgagctaaatgagtcaaagggggtggttttgggctcaacagctttgacattgtcccttcaaggaatgaaacaattaaagaaactgatctcctctgagaaaaagaccatttacaataacctatctactctacataaaatattcccagtagactcatcaaaacaagaccctctgataccacaccatactgggtttttccttattgggattcccccatgttttttctttaatgcttccccatgttttagaaacagatttgcttacccggaaccttccacactcaattccaaatttatcatagtactatcatttgggagtaaacaacatgtaaggggcctacacgggtggaaagcccattcaagaaactgaggatgatcaaatagtagagttgatagtatgtgtataatcccagggaggagtttcatgacggattagaaggtcaacactgcctgatgcagccgaaagatcacattaaaacaggacaggaaggaagtcctggctgtccagcaaaaggtctttagtggctatatcaagagaagcttttacagaagggtgagggtggtagcctgcgaacattggattaggagtgagagggactgaaggaagtagaaactcgagctcaggggaaggggagagaatgagcttgaggaaggccctctgatgaagggaaggctcttttctgatgccagtgagttgagcagacttataggaagcaaagaggagtctagggacagacagggattgtccaggtaatgtaggaaacatttgacaaggacagatctcgaataaaaacatgaatgcaatttctgtttcagatgtctcctttgcctgccccatcccacattctagaaaaatatttggtgcattaacagattttggacttcacagggcttcacttttattgtgcttaatatttgttccttggtgaaacacaaagagacaaactacacaaaaagagaatcatacttgatgaaaaaaatcaatgtttagaagttgctcttaaatcttttacccattgctaacatgggtatttggatgccatttggaacgtattccaggactacttatccatgaaaggattaatgatattggagccaggttcaaagtctcagcaacaagctaaaacctgctctttttagtagtcaggggcaaagcttagtatcctttcttctgaaagctttcgcatgctaagctttccattgccaagcccccgggaaggaaaataccagaagtttcactccgatagcagctttttctgagatgcgcctggtgataacattttccagtagggctatcttctgtctccttccttctctgtgtgtaccagtaaagccttgtacaagtctcttaacctttcttggcttcagtttccaaatttgtaaagtgaagataataatacctccctcatagagttgttgtgaggactacatgggctaacgatcagacagaaagcactcattaagtgtgactagcattgttaattgcagtaatagtagttctagtagcaggcttttccaggttataaggattaaagatacgctcatgttacctaagttaatggtgcattattttaagggtacaccaaaaagtaagaagaatgggaaactacttaaccagcacatggggtgcagaagcgagagcaattgtgttttctttttttttttttttttttgagatggagtcttgctctgttgcccaggatggagtgcagtggtgagatctcggctcactgcaacctctgccacctgggttcaagtgattctcctgcctcagcctcctgagtagctggggctacaggcatatgccaccatgcccggctaatttttgtacttttaacatagacgggggtctcaccatgttggtcaggttggtctcgaactcctgacctcatgattcactggcctcggcctcccaaagtgctgggattacaagcgtgagccaccgtgcccagccccaagggaattcttacagcctgacaggtttggaactctgagtctctctgtgtgtctgtgtctctgtcactccaccatatgtttagcagggttaattaatttgcccaagatcacacaattagtagatgattatgcaagatttgaaccagttgttattcattggaatatgattactgtgtaagttagcatgagaatattgaaaataaatgtcttgttagattcatttattttttaaaaaattcctatgtaggtcgggcacagtggctcacccctgtaatcccagcactttgggaggccgaggcgggcagatcacctgaggtcaggagttcaagagcagcctggccaacatggtgaaaccccatctctactaaaaatacaaaaaattagccgggcctggtgatgcatgcctgtagccccagctacttggtaggctgaggcaggagaattgcttgaacccgggaggtcgcagtgagccgagatcacaccactgcactccagcctgggcaacagagcaagactccatctcaaaaaaaaaaaaagtcctatgtatacttcttcacatcaatttaggcaggctttatttgttaacttttgttggtagccaacatgcatttaaactacttattattgtcctaatctaagaaaaactgagaaatggatgaagttggtcctagggtatcccaaagcacagagtgttttattctgtccttgggacagaggtttgattcaaaatgttttttcggaaactagccttgaacacctaattttattaatattctttttacactccatccctcctggaaaaggactggaccccaattcccaccattgcttttttgggacccattatcttccttagcttcctatgcatctacagggtagtctgggcttcacttcctcagtgtccctgtatgaaattaggtggatatagattagtctgatgtaggaatatcacactgtactaaggtttagtttgtatgttattctctcaagtaactgatctttcaatcgaactaaacacttcctatgtgctttaaggtggtgggaattacaagcatagcaagttatgattggtcacggatttctttcctctttaaatggtgacctactgcccattgtacctactcaaagcaactttctttaggaaaaaagaccacagtctactttcctaagcataaactcagttctcattccacctctaccacctgcaagatttgttaggcttaagcagtcccttaacttctttgagtgtttgttgccttgcctacttcattggaagtaaggctctggaacagggaaggtttgcctccataagactaaaagttatgctaatataagagactagcaaaatgggagacatattcagctctcttcttgtggggaataccttgcccttgaccaaaagccttgtcccagaaagagccgtgtgggtgttggctttgtgcccaacatgtggctcctctgccatgattgatggcttcatttaagaaacaggttttaggattttttcccctaaaatcttattcctgttaattatcatggatcaactttaccttagctcgtttaatacacagtcacctggtataaaagcatgtgaaaacccccagggatcgtaaccacatttatgcattgagaaaagagagtgaggccaagattttgagatgtgttcaaatgcaagaagcttttaaaatgcaaagtattctaaaactgttgaaagttgaagctaactgttgttcccttgttgaaggtaaaaagtaaagcatttttaggaaagcacttttccttatgtgtctaatatttgggaactgcataggagaacagtttaataggaaccctgatattgacagtaagatatattcttaatgtagtaaccagacccagggcagaatttgcaaacccatggtaggcatacaggtggctgaagaagaatcgggacagcaagatctcactgagatgcaattccattcctccatttgatacagattaagatttctgaaaaagaccatcctcctaaaccctcatggactctgcagataatatgaggccagaaaatgaataattcccaactcttgctatctcgttactggccagtgtgtctggcttcgctgagtgtgtgccttctgaagcgtaccctataattattcagcaggtatagtccagttcgtcctacttactttagcaagattacctttcttttatttttcctgtgaaaatccttctcttccttctttcctcctttgtctttcctctttgttaactttttaaatctaaagtgccttgaaaaacttgtttacatagtagtaagaaggaaaatgttgacttgtgctatcctgggaaccttgaccttcctgcattatggataaatcatttccctgcaggtggaagtggaaaattgcagatagaaccacattgactcacattctccttctacttccatttgagtgagcaccaagtatgcatcacgacttgagattataaagttggcttaatgatgagacaggtttctcagtcgggttttccattggctcgaagttcacaaggcagttgttgcttgtctcagagtgtccttaggtggactacatctgaacccttggcgttattataatgcagattctagctgtgctcaaaccaatgaatcagaatctcaggagggtggcgctcagaaatctgcatggttgatcagttctttagcagattcttatttttgtatgctaaagtttgagggtcaccactggagagattccagaacagggcctgcaagggaattgttcaaagtttgctcaagttaactttgttgttacagcattagcttgaatatcaggaggttttgtatttaagttctctaaaaaaagaaaaagaaaaaaagagaacagtctcaatatataaaaggaaaggttttcatatatgtgcccaattataagtatcttgagtattctaggagtctaaacagaatgtctttagatcatccttataacgatcctgagactcttttgactgttttgagttgaagacaggtaataagaaagaaatcaccaattaatgcagaaggaaataaatttctgtatataataatattcacatttgccatgtctcttttaaaaagtccaaataacaggcagagcgcggtggctcatgcctgtaatcccagcactttgggaggccaaggcgggcagatcacctgaggtcaggagtttgagatcagcctggccaacatggtgaaaccccatctctactaaaaatacaaaaattagccaggcgtggtggcacttgcctgttgtcccagctactcgagaggctaaggcagtattatcacttgaacccaggaggtggaggttgcagtgagccgagatcgcgccactgcactccagcctgggggatagagcaagactccatctccaaaaaaaaaaaaaaaaaaaaaaaaacagctcaaataactttaccgtacataactttaccatacatgtcctctagtctcttatcatttcttcatatgaagaataatttatactcattgatgtaaattttgctatattttatacaacaaacatagtattattttaatattgcacatagagaaaaatacctcttcccctcaaaattagaagggttggtatttttattcaggcttattgatttaaaatacctgcttgatccgtaattcaggccatacgatttcaccaaaacaaatatcctaatagttgtcatcttgaataactgtttagtgcacagaatgtagtctcatttattaagaagtgatttaagagattattacttctgcatctatcacactaacatgaccaactctttagtaagggaagagtaagggaacttattttatatctagatagaaattttattaaggatacagtattaggattcataggggaaatagtggatagatcacaagaacgaggctctttctgagccctgcaggaaagaatatttgcagaacaataaaggacatggtggcttcctggagaatgttggccgaagactgagccttacttctggaaaaggctcagtgctagagccaagtgagcatcgatatgccaatacaggcaagaaaatcctgcaagaggcagacttggttcttaggtcggaacaggctctgcttcagaacttgatccggtacccaattcgtttctgcttcagcttctttttctataaaatgagggtagtacttatcccatgagggagctgttatgaggataaatttggctttattgaatgtgcatgattcctggaacccataaagatgtcaaatttagaagcctcagagagatttcctttgctctgtgaataactaaatttggttagctggggtggggtctgggtacttttccttgtgaagaatttttccctcattctggtcatctcctcccctcctatagaggcaccatatatttttcttgtctcaggtacctatagtgataaaacaccctgagctgaaaggatcgctggatagggcagtctcaatacaaaagaatgtggcagaagctcaggcttcagtgcacatcagaatagaagcttcatgagggcagaggcttttgtctgctttcctcattgcagtatccccagaactttgagcaagtgcacactcgatgaatacttgaaagaataaatcaatgtcagacatctgggcttatgtctcatctttctactgttctcaactaagagattctcgtcattctacaactttcctgagcctgctctccttctccaaatattcacccttccaggcactgactccacctcccacatcagagctttttcttaaagtaaataacagtcaacaattaatagcttcataactttggaacagtgcagtgtctttggtttaagaagcattgtttccatcctccaaactaaaataaattttgagaaaagatggagatggtttgggactggggaagaagggaatggaagaagtgattatttgagggcacattaactatttgtacaaagtagaatatcttagttaaatttggctacatagcaagcaggtatcattaaatggatgtctgttagaatcttgattttcaaattaactagatagtcagcgttagttagactgagggagggtgattacagtcctatgtcactgagggagaatggtgaaagggcaagagaaggctggcaggtagagctggaatttttctgccagcaatagaccagtggttcccaaatgtaagcctgcaacagaatcatctggagggcttgttttttgtttgttgttgttgtttgtttgtttttggttttgtttttttgagacagagtctcactctgtcgacaggctggagtgcagtggcgcgatctcggctcactgcaccctcagccttccaggttcaagcgattctcctgcctcagcctcctgagtagctgggattacaggcatgtgccaccagcccagctaatttttgtatttttcgtagagacggggtttcaccatgttggccaggatggtcttgatcccttgacctcatgatctgcccacctcggcctcctaaagttctgggattacaggcgtgagccaccgcgcccagccaggagggcttgtgaaaacacagatagctgggcccatccctagagtttaggattcagtaggtctggcggaggcctgatagtctgcatttctagcttggccaggggatgttgatgttgctggtcccaggaccacattttgagaaccactgcaatagagagtgtgcatgaaaatacaacaacaattacctgatggtccttagcttagttcagttgtcccccacaggttgaagcagtgttcaagggcaaacaaaaactttctctctcagccacctccataagttccatagtttatttaacaaagcaaactcacaaagaaggaggaagttaggactgctccatttccccttatagcaaaggcatgtgtatttcacaactgcaatcagcttgaatagcagaggctggaaggctctccatgtctttactgaagtcacgtcactaagtcacacagacatgctgctaattcactgccttggccagcacatctgaaaataaatagcaccattataggccctttcatgaatatacagcatgtggcctctaaattggccaaggagctggctatgctgggacaaataacttagataaatcacaaatcagagtggagaaatgaggtgtttttaatcaacagcatccaacaatgtgtgttgagtttaactgaatccaggtagaggagggagtgggtgcaagagctcaaagtatgctgagaatagttttatttcaaaattccaggagacttagaaacaacatggtaatgatgaaaggagcctgaagagactctttttttttttttttttttttttgagatggagtcttgctctgttgcccaggctggggtacagtgtcacgatctcggcatactgcaacctctgcctcccgggttcaagcaattctcctgcctcagcctcccgagtatctgggattacagacatgtgccaccatgcccggataatttttgtatttttagtagagatggggtttcaccacgttggccaggctggtctcgaactcctgacctcaggtgatctgcccgccttggcctcccaaagtgttgggattacgggcgtgagccaccatatctggccctgaagagactcttaagatactttcataatagtttaaaaagctgtatgtgtgtttacaatttctgtcataaatctatggtaaccacagcacaaacattttagaaaaagaaaaaaaaaaacaactctcggttgagtgtggtggttcatgcctataatcccagcaatttgggaggctgaggcaggaggatcacctgcatccaggaatttgagaccagcttgggcaacatagcatgacccatctcgacataaaattaaaaattaggtatggtggtacatgcctgtagtcctggctactctcaggggactgaggtaggaggatctcgtaagtcctggagtttgaggctgcagtgagctgtgatctcgccactgcactcagcctgggtgacagagcaagaccctgtctcaaaaaagaaaaaaaattctattttcccacctctctaacataactgtgaatagtagtatttccttctagtttttaagtacactatttaaaaacatggaaggttttcaaataatgtacttagatttaaatgcatttttaagcttatacccatataataagcatagtaactaacagaatgttctttggagtcagatagtcttgggttcaaatcctccagacatttccagccctgagttttgcatttgttaaatagggatgataaacctggttcatagcattgctgtgtggattcactgaggtgctcatcaagtgctcagcacagagccctgtgtcatgtaagcactcagtaaatagtggcatcattttctgttttcacacacaaaaaatgagtcgaccttctgcaatcctaataatcagtaagttcttcttaatggccagaagtatacctatttttagtctatgcatttggcaaaatttcattccacaaattgtttggtggtcccaggagctgctttcaagatcttctctgaccagcttgtcgagagcttttgttatctgtgttttcctcaaagattagactcatgaaagatgtgtgaaagccaaaacaaaggaatgaccactggtgctcagagtgagagagattggtttagttgtttagccaggctatgtggctttgttcccagaccacagattataaccacaccattgtgggcaccacatatagccattttggtaaactagatatgggttgctagggacatgggcaagaaaccatgggtggggaggtgtggacctctcagccctgccctctcaagcctggccaacttcacatctgcaactgggactttgtttctgttccagacctgtttatccaactgccaacttgacagccacttggagtcctcatgagaacctcaaacttagtatgcccaaatgaaattttcagctcaccagaaggtaaccatactgtcttgagtcttacagttaccctgtaaacaaagggattaactttactagatagcaacttcctgcccataaagttaagaaaagagcccctcaatgcaaatgttggttttgcttatcaaataaatggattcttggttcttcaggatagttacagataacaatgggcagaatagccagtaaattcagtaactccttaaaattgttgaaagtattttgtgcactttctttatatcgctgcttagagtgttaattggtaaaatactctgaaggactaatacacaaacactttcacccagcaattccaattctaggactttattccacagatatatttatacatgtatgagttcacatgtacagttttctgaatttttttgtgctggcagaaaactagaaacaacagaaatgaatgaaagagactagttaagaaattattgcccagttttatagtagaatacatatgcagctgtaaaaaaagaatgagggaattattatgtatttatctattaagtgaataaagcaaaatgaagatcaccagcaaacagataaagaaattgtggtattcatacagtggaatactcctccataataaaaaggaatgaacaatgggtgaacactacaacatagacgactctcaagtactgtattcccatttgtgtaaataaaaatgtgggaaagaatgtatacatgtatttgcttataaactctatatgcacagaaggaaacacaagaaattattaccccgggaggcagagcttgtagtgagcggagatcgtgccactgcactccagcctgggcgacagagcaagactccgtctcaaaaaaaaaaaaaaaaagaaattattacctagattgtctatgcagagggaactgggtacctggcagacaggagtaggagggagacattgtacaatatgcttttttatactttttatatttaaaattgcaaaatatcttacatgctcaaaataaaaatagaatagcttatataactatgtctaaatattacatgtagttttcttctctggctattttctttttggtttttatataattttttaaaatccacttacttagcccaggcacataaatggaaagaaagatatgcttaaaattatgttatttgcaaaaacaaatatttagatgttttagagctagtatgtttttgttggtttctagtttagttctacatggcatcagactagctactctatatgatttctggacctttgcaatttgttaagatttgttttatggtcggggatatggtcaatatgtaaatgtttaatgtgtgcaagaagaatgtgtactctgaagttaggcatagtgttttctgtatatgtcaattagcacaagtctgtttatcatgttcaagctctgtgtatctctgggtttttttaatctgcatgatagaacagaagtatgtttgaaacttttattgtagttgtggatgtaatatttttcctctacttttgcagttcttgctttatatattttgagcctatattacttggtacatacatatttagaattgttgtgtcttcctggtggattgccctttgattatttaggaaatgtctctctcttcggtaatgcttcttaaagtccattttgtctgatagtactatagctacctcagctttcttttggctaggtttcataactttttaaattctttcactgtcagtctttttatgtccttatatttaaaatgtgtcaaaagaaagaaggagaaagaaagaaagaaagaaagaaagaaagaaagaaagacaccgcgatttacctatgttacaaacatgtatatgtaaccctaaacctaaaataaaagttaaatataaataaataaagtgtctcttcatgaaaactttcttagcatcattagtcattagggaaatgcaaattaaaaacacaatgagataccaccacatacaacatgtctagtataatggctaaaatgaaaaatactaacaacaccaagtattgttgaacatatggaaaaactggaacactgattatgggagtatacaaccatgttgtaaaacactttaactggtcatttacccaagaggaatgaaagaatgtatccatataaagatttgaacacaaatgtttacagcaactttatttgtaataggtaaaaactgaaaacaactcaaatgtccatagacagatgaatggatttaaaaaaaaccatgttatatccatacaaaggaatactcctctataataaaagggagtaaactactaatacacagtgcaatatagatggattgcaaaatgattctgttgaatggaagaagccagaccaaaaaaagagatatattgtatgattctatttatgtaaaattctcgaaaatgcaaaggatctacagtgacagaaagcaaattagtagttaccaggagacggagggtaaaaattaagaaggggcatgaagaaacttttttattgtagtaatggtctcatgggtctatacgtatgtcaaagcttatctaattgtatactttaaatatgtgcagttcattgccagctaattatactcaatctgtttttaaaagtaaaatgtgcttcttataagtaacaattttttaaaatgtagtctgatgacctttgtcttttaattagagaatttaatctgtttacatttaataactgatataggcagggcacggtggctcccgcctgtaatcccagcactttgggaggccgaggcgggtggatcacctgaggtcaggagttgaagaccagcctagccaacgtggtgaaaccccgtctttactaagaatacaaaaatgagccgggcgtggtggcaggtgcctgtagtctcagctactcaggaggctgaggctggagaatcgcttaaactggggaggcagaggttgcagtgagctgggattgcaccactgcacttcaacctgggtgacagagggagattccatctcaaaaggaaaaaaaaaaaacctgatatatttgggtataaatgttcaatcctactgtaggtttttttttccattttgcccacttgtttcttgttgctatagtcattacaacaatacatgtttgacttattagaatcctagtattaattagtacttttaccatttcccagatgatataatatgggctttaaaacacatgaaatccgtttacccctcaaaccttttgtgtatcattgatgttttaattctatgtatattttaaacttcacattattatcattattatatttatattgcacagtcactatcatttagatttacttatgtttacccttttggtgtatttcaatgctttcagcacttctgtgtttccctttgggattgcttttcttctgcctcaaaaactctccttactatttattttagtatggctctgctggtgataaattctctccatttttgtttatctggtaaaatatttttccttcattacttatgaagaatattttcactaggtagaaaattctagattgttagttattttatttcagcactttgaagatgtcattgcattggtttgtggatttcactttttcaattgagaagttaattttgttggttgcattattacactttgaagataatgtgtcttttccctggatgttttaaagatttttctctttgactttcagtagttctactatgatgtgtctaggtttgatttcctctgtattgattctgatgggcatttatagaactttatgaagctgcgtctggtatttttgccagccagtatttctttaaatattacttctgctccagtttcatctctcctcctcctttgggatccagcttacacaggttacatctgttactttatgactcaacacacttttctggaaagactctcttttctttaaacacaagacactaaatggttacaggtgttcttttaggtgattatgctgcttcatcagcagatggtgattatatcaagaaggaaacttatatgatgacatataaaagctggggagaggagatgtctctgaagacagtgagaaatccttctctagtcttgctgctggaaccctcaaacacttaagtcatctaataaacattctactgtcttcagaggaattttctcagtgaaagggatttgggacacccctgtgaggaagaaacataagttccatgccttccaaataaggggcaaacttttctttgtagtcatgtttccacctgttgaatccgttttatggaagttgtacagttatggcttgtctgtttatgagaagagatagagaatatgagaaacgataaaacctgaaataatccattgtgaggccacaggctgaagaacttacaaggaatttattctagactttatggctgaaaatatgtatgcatatatgtatatgagtgtatggagatacagttatggatagagatctatagatatatgtgtagatatatagatacataaagtttgctacagaaattcattttgtacacttttaaaagtgcactttactaaaagcatccaagaatgcatctcagaaaaagccttagatttcttttatgtggtcaactccaggaactactcactcttgagatagatgtgtgttttcagagcttatccatgccatgcacaatgatctaaccctttgatagctgcatcattcaaagtcagtttttctacatgcaacaaatttttaaaccttgatttttatttatttatttattttgagacaaagtctcgctcttgtcccccaggctggagtgcaatggcgtgatctcagctcactgcaacctccacctcccaggttcaagcgattctcctgcctcaacctcccgagtagctgggattacatgcacctgccaccaagccaggctaatttttgtatttttagtagagacggggtctcaccatgttggccaggctggtcttgaactcctgaccgcaggtgatccacccgccttggcctcccaaagtgctgggattacaggcttgagccaccgtgcccggcctaaaccttgatttttaaaaaaatactaccctgccctaaccttgtaacttaggaagtttggggagaggggtgtgtaacaacctttcactgcttatttgatgtaaatcatttctagtcctgaaacaatggctattttgcaaggtttaattatactgtgtgttgtggttgcatgcataggtacacccacaaatgtctgtcattaatacgtatcactagctttgtactttacactgtatttttggagtgttttacagtcgttcgttaccaagagtaaattatatatttgcttttctttaccccacccctttcactattgtttaaaacatgtcagattcaggaaaacctcaagagacccaaacctctttcaatacttatagacaaagtttttttttccttaaatcagttttaaaatccatccagccattttggctgccggccataccagcagataatgaaagaattttccttgagggtcaaaagccagggagaagccttccagggctgtttggtttcctagcacagctgctggagtagctcgtggtgctgattgatctgcttggagattcttgtgcatcttcacctgttagagctggaaagatgctcaggactatacagcccagcccttctggtttacatataatgaaactaaggcccaccttagtcaactaatgtgcttaaactcaagcaaatggcaaatggcaaaactcaggactctgtcaatgagttttcattctttttctttattcttctagacacatattttataaagaaatgaggcagcatgatgtttaaaatacttaaagtgagaatgagaaaaactgatgtctacatatcatgaaatggttaaaaagtttaacgtgcattgtcttctccattagaacttcttttacgaatttttttctcaaaatctggctcagaaatcttgttttaaaagctccctaaacattcctaggcagaattagtaacgccttcctctttgctaacaaggaactgtgcatattcctgtaatagaatacttaccatattatattgtaagtattaaattattcatctgccctcctcccacctacccactggatcaggcttcccaggaacagcaacagagagcccagcaatttgtgtgttctcagtgtggaatgaatgaatgaatgaatgaatgaatgaaccaaccattccttcacagtcttgcactatcagtgaatcttatgctttattgaacataaaaatcacctggaattgctgacttaaaatacagttttccaggctataccacaagagatgctaatacaggactggggtaggtccaggaattcgaatttttatctaagtagctgatgacttaatgcaaatgatccagcagccacactttgcaagctctacgctatgattagttgtggtttgtagtcccaattgtatatcataattatctgctgatctgaaaaaaacatagagcttctctacccactccttaccaccagtccatcaccaccattctgactccttagtcacaatgggtattgacattttaaataaatcccaaggctcccttccgggagaataaagaggataatatttataaactattttgagttccttagaagaagggtatcttagctcattaaggaaatattatcatgatataaatctaacatcatgaaacttatcttggacatgtcaaatttggtctaagaatcaaatgtagaggaaaataaaacccacacacagtacctgcatggaaacggaacctgtgcaaacacctgctttggctatgttcctttttgtggagacagatgtcccccttcactaggaccagggtagagatgaagaaggttgatttggacattggggtgctatatgttcttttgggactgaagttccatattaggaaacttaatagctgacatttacataacttttaaacatcccaagtagtacgctctgtctgcacactattttatatgtatgcaatttgtttgtttttgtttttgttttgagacagggtctcactttgtcacccaagctggagtgcagcaggcatgaacacagttcactgtagcctcaacctcccaggctcaagcaatcctcccacctcagccccctgagtagctgggactacaggcacacaccaccatacctggctaatttttgtattttttgtagagactgggtttcaccatgttgcccaggctggtctcaaactcccgagctcaagtgatccacctgctttggcctcccaaagtgctgggattacaggcatgagccactgtgcccagccatatggatttttttaaaattatgaacttacataacttcacaggagacagacctgaatgaggtagttattaaactactttctgactatggaaaggatttctgatccttgtagtatatttccacgtatattgttatactgttgtgtgtttgtatttagttgctcatactattttttactgtagcttactttatatgcaggtttccatgggtcaacctaatttatatttttgtcattttaaatggaaaaatgatatcccatatattttgtagtattatttgttcagtgttctttccaatgtgggatgctttggttatttctaattatttgctatcatgctatcatatacagaattcttatgttcatttctgctcaaaattatatttttgtttgtatgaattccacggtgtatatttcccaaagcgagatagttagataaaagagtaacagcagtttcatagttctggttgcatattacagtattactttccagacacacagagccaatatacaaccccaccaggggtgtgaggcatgctggttttcccacagcttgaccaacatgaaattttatcattccagcctatttctgctagcttaatatgtgtgtagggcctcactagagatattttattttgaagttcttcaaatgatatgaagcaattcttttccacgtggaatgattcactattttcattttaaggacaaaccattcgtttgtatttgacagttttgaagtgacaggtttaattgccttctgtataattgattctgtagggagagaaaataggagtgctattaggtattgggttaggctcaaagagtcaagaaagaagattagttgtgtagttctgaatttggaaacttgtatgtggacgactggaacagaaataccagttgaccctgtttaagaagggctagagagcaggaacattctgatttcatgatgacaaaaatactagagttttgacataggacaacagatcttgcttcaaaatgaaagcaagaccctatccttcctgcctctttgatcctctcacagtgccactttctttcctgaacattttcagatattcttatttcagatagaccactctggtgtataataggaccagttttagagtggccatgaagctaagacatgttatttgagagctcttaggggaagacctggacacagcagtcgcaggagaagtcagtcttatctgtaaaaaggtcagcttgatcacagaaaaaggctttggcttggttgtgttggccctccatggcttatgatcctctttcaagtaagcaaataaatgattgcagtgttggtttgagtcctgtggtgccaaacacaagacacattgttgctcatgcaatatagacctttgttttggacagtggtctaatctgctggtttttaaaacattggtgactgtccaacttataattaaaatcagtctatcaagcacttggagacaaaatctgaggttattctttcattcctagttgtcacactaattttttgccttcacttttgtctctgtagaatatttacacgtacacctatctatatctatttagatataatttatatactacaaaattcacccatgtgtacagttcagtgatttttaatgtattcacagtcatcactacaatcaatttcagaacattttcattactccaaacagaaaccccaaactcattagcagccactctccatttctctacaatatccccaaccttaggtgaccacaaatctactttctgtctgtatagattttgcaattctgggcatttcatataaagaatcatagaacatgtggtcttttggtttagcttatttcacttaggataatgtttccaaggttcatttatgttgtggtgtatataggtactcttttcctttttattgctgagtaattttccattgtgtggatatacaactttttgttaagtcattcatcagttgatggacgtttggattttttccattttttggcctttatgaataaggctgctacgaacattcatgtgtaagtttttgtggggaagtgtggttgtctttttttttttttttttttttgcaacagagtcttgctccgtcacccaggctggagtgcagtggagcaatctcagctcactgtgacctccgcctctcgggttcaagcaattgtcatgcctcagcctcccaagtagctgggattacaggcacacgccaccacacctggctaatttttttgtatttttagtagagatggggtttcaccatgttggccaggctggtcatgaactcctgacctcaagtgatctgcccacttcagccccccaaaatgctgggattacaggtgtgagccaccacacactgccagaagtatgttttcatttctcctgggtaaatacctttgagtggaattgctgggatacatgggagctctgcttaaatttttcaggaactgccagatggctttccaaaatggctgcaccattttatactcctaccaacagcatatgcgtgctccagtttctccacatccttgcaaacacttgttattgcccctctttcttgttatagccagcctagtggttgtgaaatggcaactcattgtgatttgatctgcatttcccatttccctcacggctagtagaatacttacttcctatcctagtttttccttatacttttaaaaaattaaataaagaaaacgctgtagaaaattaaggagcaaaatgtatgcttgcagctacagcttcctctggggtttcacacttccttgcctcatcatgtaacgggccaccactaggatgaaggtgctccagtcttattcttccaatcttctctccatttgtcattcagaatcctgggaaagagagacacttgtcctgccgtgagttatgtgcccactcttttgatttgtgtttctgcctagacagtgcacagcatgagtgttggcatcttgaaaggaaactggggtgctcctgagggagaatagatgccaaagttgggacaagagcccagtttcctgcctttctaggtgtaactcattgccaaggtcgggagcaaagcaaaccatgtaggaaacctcatcatgctgggtagttaataagtatgccctagcacacgttttcacagagaaaacataatacgcttcatttgtaatatttaagtattacatctaaagttacaatgtttaaaaatttatatatacccttgttggatacaaagcatgtttaaaatatgtgacctcatttgatcctcagtaatctctgttagtttctaattatattcagtagtggtattggtattgtatgttttggcctcattgtggtttaaatacacttttgtgaactagcctgagaatccaaccaccaacacaatgatgtaatgagaaaacgtgctctgagttccaaacaaatggctaacagataagtgctcagaagtcaacctttttgtaagctggggtatcactggccagcagtcacatgccagcaggtgtgagtagacagtggggaacaatttcctctcatgtgtatggctccctaaagtgttggctgagcattgtccacatgggtgatgcaaaggatcactgaactaggagcagttgggaaaaaatacaatcattgggaattcctgtagcatcgaaggtgcctacagggaggtagaagtattcatacaacagttctctggtgttctctgttgtagcaaccagtcagccaaaagggttcagctgcttgaaatgagaatggctggatcaaaatggcagctcaggatttaaaggattctagtcagataccagacatcctcacatagagaaaactctgaatggctgggggagaaggagtcaaatgccctggatctttttcttgggcctcaaagtcctccttctgtcatcatccttccagtattgggcaggacctgactgcaggcatcatggcctctgtgaacttctcaagggtatgtattatctgacaaaaactacgatgtccactaacaggccactgaaaaggtatcttagtcagttctgctcattgcccagccaaggcctacgttttataacatgatatcaaagattgcatctaaaattgtgatgatttcctaaaataatcatttcatttagatttttctattttaatccaaggtattcttcagcggaaataaggaaacagtttactctcccaccaaaccttggccagtaccatcgacagagcataagtacctctggcttcccctctcttcaactagtaagtatgagttccaggtttacttagcgattggtcaagtgcaaaagtgcccagggtatgtgtttgcctcctgttccttagatcttcctaccatcacctcacattctccagtcaccagatcctaactctgtgactgtgtctggacatcagacaatatccctctctctctctgccaaccggtacttagggtacataatagaacctctgggagctgtggttttgatgtctctagactaggtgggcttccaggtgactcagtctcatccaaattatggttcatatttgggggagaagggctagcccaaaaacttaccaccatttgtagtatgcatttttttggaaaagcatattccaaaatctgaaatgccaagttacagacctcctttttgtaaaataattttcttgctagtataatttacatataataaaattcacacattttaggtgtacaatttggtgaacttgggcaacttagagtcacttaacctttcctcagtcaagatatagaacacttcttttatcctaaagcgttccccagcgcgcttttacaatctcctctccccaggccacaccctccaactcacgcaatctctgactcacttctgtcaccataattttgctctatctggagcttcatatcctgttacagtatgtacaaaccttctttttttgagacagggtgtcagtctgtcacccagcctggagtacagaggtgtgatctcagctcactgcaacctcaacctcccaggatcagatgattctcctcccacctcatcctcccaagtagccgggactacaggcgcatgccaccacacctggctaatttttgtactttttgtagagacaggggtctcgctatgttgcccaggctggtcttgaactcctgggctcaagcgatcctcctgcctcagcctcccaaagtgctgggattacagtgagccactgcacctggccctaaaccttcatttttaaaacacatttcctcttaaattgaagattgcctacatttttatatcaatgccaattgttgagtgtgcctatatgtgttatattatttgagcactaaatgccagatgtgtgccaagtgagataaatctgacaaatgagatggtttgtaaaaccagcagtgaatattcacttcctctgtgagagagctccagccctcctgtactcacttcctcacacagcacagcagcactcttgctggttctgctgcttatcttgaagaggttaggttactttttgtttctacttattacttcgaaaccacttctgccttagaaattttgtaaccttccgctcagtttccggtaaccgccattttgtctcctgtaacaatttacgcgccgtgtaactgtgaatctttcaaaggtatgttttactggagtgatttctggttatttcagaaggataatttgtgtgttgcgtcattaatgaaatagtagtacgaaaaacctatagcatcttttactgcaggaggtaactttccatgccattttttcagaaaatctacttatgacttcagtggcttgctagactggcctttttatttgtacttttcctgtgtttcagaattgcagagtataataaaggcatgtcaagtgcatattgtgtccattttcaggtatattagataagctttacaccaagataaattagatatgcttattggtttaatttgtgctaatatatatttaattgaaaaatcaaaaaaatttttttaaattgactgaagttgtattccaaaacatgcaaaatttagtttaaaatagattggatacacttttaaattttaaacaaggtagagggtttagtgctttgcttttttaaaaagtaaatgaaggctgcagctttctgcagtagttgtcttgggaagtagtgtggacatcactcctaagagacgttaaggaagtttagctaacaggctttaaccctttctctccataccagcttttactcttttttttttttttttgagatggagtttagctcttgtcacgcaggctggagtgcaatggcaccatctcggctcatcgcaacctctgcctcctagttcaagcaattctcctgtagttcaagcaattctcctgcctcagcctcccgagtagctgggattacaggcatgcaccatcacatctggctaattttgtattttgagtagagacggggtttctccatgttggtagggctggtctctaactcctgacctcaggtgatccgcccgcctaggcctcccaaagtgctgggattacgagcatgagccaccatgcccggccaccagcttttactttaatgccacagccttaaattttctttcaggagaaattattttatgtaaagttacaaaggaaaataatgcttaatatctgtaagcattcgtttggtaagtttgctgcctcctcagtaagttttgatgaaagtgaattttgatgaattactaccttagccgggtagtgacgttaacatgtggcttagctgtccattttctaagatatcaagaaaccagcaacaataagtaaaattgttaaattatgcaagaatcacatgttcctacctgtcatcatttagtcttggttctatttgcatgtgaatatcctttagaatatattactcccagttattccgctttacttttctgaatctcttttcccatctcttgacttcaacttcagtatatggctcttgttccttctacctggagaacggaggcatgtggaagcccagaggattgaattcttttttttttcttttctttcttttctttttttttttttagatgaatagtctgcttaggaaatccatctccataatgtttacctggtatcgtgttgtaatgtcagaatgaagtggctgttcttccccttgagtcatcgtcccgaatgaaggttccccaaaagaaatcatcaacttatgtggtgatttccttttacctttaaaaaaaaatttcttttcatggaaagataatggaacatgtcggtaagattcatttctaggaaggcaaaggagtagtttatcatctaaagactctcaacctaaagctgttttagaaaactttccttaaaatgagaagccgtaggttttcgttgcattattttggctaattgaaaaataagaccaagtgcgttctgaccttcgtttctcttacctttatttttacaaccaccatttcaatggcccacttgctgatacaaatgattgtttaattttaaaaagcatttaattgaagtcaagttatttagaacctaatcatttacacgtctttgttgttgctgctgttttgcaagagtgaagagcttggagtcaggtgaatctgggatgaggtacagttgtcatttattagtcatgtaatttgtgacaagccacttaatctctctgaagacttcagtttcttcatttgtaaaattggcataataatgctgtccctagtagggaatatagaattatataatgggtcctttgtatatattggctagtattgctctcttacgatttggcactatggagacactgtgggagattaaaagaagatgatgaataaaaggtgacttcagctctgaagggctttatgatccatttgggagaacaggtaatgtagaatatactggcttcaaaagtggcaggtgtttagaagagaaaaggatacatgatgtgataggaggcaaaggcttgattgagaaggctgagaagacttagagtaagggttctcagccctgactggacattaaaattatctagggacaattcaatcagaattcctgggggtggggaccaagcatcagtattttaaagttccctggggactttaacttgaagcccaggttgagaatcatttaaacagctctgttatttatttatttaaaattttaatgtattttttgagatggagtctcgctctgtcacccaggctggagtgcagtggcgcaatcttggctcactgcaactcctgcctcccaggtccaagctattctcctgcctcagcctccccagtagctaggaatacaggcgtgcaccaccacaactggctaatttttgtacttttagtagagacagggtttcaccatgttggccaggctggtcacaaactcctgacctcaagtgatccacccacctcggcctcccaaagtgctgggattacaggcatgagccactgggcccggcctagttttactttttttttttgtaatggaatttccctctgtcacccaggctggagtgcagtgatgtgatttctgctctctgcaacctctgcctcctgcgttcaagtgattctcctgacttagcatcctgagtagctgggattacaggcagctgccgccatgtctggctaatttttgtatttttagtaaagacggggtttcgccatgttggccaggctggtcttgaacttctgacctcaggtgatccgcccgcctcggcctcccaaagtgctgggattacaggcttgagccactgcgctcggcccatttaaaaaaactttaaaggtagacgtattccaaatggggggaatatataaagaaaggtaacacttattttgccctgtgtgctttgaatttcagaaggtgtagtaagcaaagaccacttactaaccctacagatatatccttagaaaatacagtggtttctgtcataaatctgataaatcagatgagaggaagggtgtatgtttgatgttgatttttctttttgttttattggggtttttaaaaactataaatatcaggtctgatgactatgtgtataaacattttctaagtagataaaatattttcaaattttgcattttttagtatgaaggggatccatcatttgaagttggttttctagatgtgatgataaacttgtcccaggtctatttgacactcctaccaaaatcctttgtgaccagggctagaaggcagctgtggctagtaaataaccctgtgtgtagactcacttattggctttggcattctctattgccacagctgtgtgaatagattaaccagagaccctctggtgccagccacctattcaggcaaacaagtctataatcagtacctctgttaaaatgaaactgtaatatactattgtcttttcatttatttatttatttatttagagacagggccttgctctgtcgcccaggctggagtgcagtggtacaatcttggctcactacaacctccgcctcccaggctcaagcgattctcctgcctcagcctcccaagtaactgggaccacaggcgcaccattgcgcctggctaatttttgtattttttttgtagagacggagtttctccatgttgtccaggctggtcttgaactcctgagcttcagtgatctgcctgccttggcctcccaaagtgctgggattacaggtatgagtcattacacccggcctattttctgattgttcaaagtagaagccaggcacaatggctcatggctgtatgtaatcccaacaatttgggaggcagaggcaggaggatagcttgaagccaagagttcgaggccagcctaggcaacatagtgagaactcatctctacaacaaagttaaaaagaaaaattagccaggcatggtggcacatgcctttagtcccagctacttgcgaggctgaggcagaaggatcacttgaactcaggagttggaggctgcagtgagccatgattgagccacagtactctagcctgggcaacagagtgagaccctgtctcagaaaagaaaagagaagagaggagaagagaaagagagaagagaagagaagagaagagaagagaagacatacaaaagaagagtaacatacaagagaagagttaggagaccctgtctcagaggaaaggaggggaggggaggcgagaggacaagagaagaaagagttaggatctatgccctaaggaagtaaggaggatttgagactgtgtaggtggttaataaccttaagctacatattttatggagggaaaaatcctatttttaaaagtgagaatagaacaattttgaagtgaaatggaatgaattagctggaccataacggctctgactgaagaaaaggatgtaaaaagccacatcctggatatgtaccaaacaccatggttacatggcatgtttgtatatgtaacatttatttaaaaaaaaagtctcatagcttagaaggcatttatttttgttatgtgtataggcttctgtgcaataaagcagccttttttattttacagctcatgatgacttaaatggttaattgcctgataaatatggtcctcttttattcttctgattctgttgttcttttgcacttcatctttcaaggggttgggctattcttaggtttcactgattgcactggaagggacatgacggaaaatgaagatctcaagataattttcttgcaaattcacaatggaagataaaaggaaagagtggcaggcattctgcacacagagcagacgtttctttattgtcattgttcagcagaggaatcaactcagccttggtgaaactagagtgatgcccatggtggcatgtcagcatctccctcttagtggcatcagtgctagattgttgttgttggaagcaggagagtgtttagtccataaagtacagaacttcgatatcacagaagctagaagaactttactgccttcagcttcgtttaaagatagtagagagcttactcattcgttttagaaatatgtattgggtctctatgtcaggaactgctggcacagcagtgagattgaagatacaacagtgaatacaatagagggcctatcctcatagagtttgcctttcagaatgagggacagacgcagacaaatagaaaatgtcgattgtgtcagggagtattgagggctttgaagaatgaaatcgtgacccagaagagatgcttttagattggatcatccgtgaaggcctctatctagaaaggagacacttgggcagaattctgaatgaacttgacggacatctgaaggaaaaatattccagtcagaaggaacagtacgtgcaaagtccccaaaacttcaataagtgacgtgctccagaagcagcaaggaagcagaatgaggcctgaacagagtgggcagtaggaaatgcagtcatagagaaagcagggctgggtcacaggcctcagagactgtagaacattggctcctactctaagacaggaagctgctgtgagcattgaggttgggcgtggaaccatttgactttttatgaggatcactctggctgcagtgtggaaaatagactggacgagggagggcagttaggaagatgtcacggtaactcaggaaagcaataccggtgctttggacgagggtggtggcagaagagaaagtgagaagtattctggatatatttcagaagaaagtggataggattttctgatgggtgatatgtagagtgtaggagaaagagaagaagcaagattgactttaatgttttccacctgggcaattggtggactggaattgccacttgcagaagtgtggaggtatggaaggtatgggaagagcagattgccaggaaagttgagttagttttgaactcattgtgtttgagaggtctgttaaattatcaagtagtgatgttgaggtgtaattggaaaagtcaacctggaatttatggcagaagttgaggctgcagatataaacttgtaattttaaaaatgtatatttaaagccatgggagtgaatgagttcatttgagattgaatgcagattgagaagagatttagaattgaactccagggcactgcatagcaggaggaaaacctagtaaaagtggtatctgtaaaatagaggaacgaactgtcacaatttgcctggtactgaggattttctcagtacatgagactttaagagactgggacaccctgagacaattggttgccttccatgggaagaaagtatgtcaagagggagagagtgaacaactgtgtccaataaaccaggactgagcaaaaaccattgaatttggcatcatgaagtcttaggtgactttgacaaggcttgtctgttgtgaacagccaagtaaatgtgaggaccactctccaaaaggtaaagaaacatgcatgaggatacaggtgcgccagctggagacatcatgcctcttccccgtccccaccaggagtggcgtgaagcctccccagtgctgtaacgaggcagccaggtcctgtgtgactgcacatgtgacttggggcaagtcatttaacctctctgttttcactatcctatttgtgaaatattgtttagatttgtggtttgagtcagctatctgtatactacactgtgttaggagctatgtagattaattttcaacagatatggttctggggttgtaggaattttcaatttgagaacaaattgaatcttaccctttgtcaggagaaatagcctttgacatgtgttaggggcaagggaaatctcaaacttgcttaattttaaaaatgaatatttggttgtggataatttaagctttggtgatatttctaattattttttgtgtgtttctagtctactgaccagaagtctgaaaaaaacaactaaaaagaaagactgcataagccttcactagagaagtattgaaaattgcttgagggaagtgacggtttctttagcctagtgtctgtaggaccccagtgtagtgtttgttgaatgaatgaaaggaggcgtatcagtcaggttcactcagagaaacagaagctgtaggaaatccatatggatgtgtgtgaaggtattggcttgcctactgctggtgtgtggctaagcgagcttaaaagtccgcagggcagatagtcaggaaggaaatattcccaacagactgagctcccttgggcacaagctgaagcctggagtctgaactgccagagagcctctaccttcttagaaaaggcttcccactggctaagtcaggcccacccaggggaatctctcctttgattaacttaaagtcacctgtttagggactttaattacattggcaatagtcccttcacagaagcacctaaatgactgatgatgtaactgaaaaaatgtgtgtgtatgctacaaaatggctgcagtctcccttctgtcctccagctcttgcaggagaactctcttgtagctcaccctgtctgaaaacatactggaaaggaattcaaggaaatgtagttcagcctagccacgttgacacatcatgaagccgtcacaaaaggtaaagcctggtttaggagcatttgcatttgcagtcttaagtatttttgtcttatttttcaaaaggggttgggcacggtggctcacgcctgtaatcccaatactttgggaggccgaggtgagtagatcacttgaggccaggagtttgagaccagccaggccaacgtagtggaaccccgtctccactaaaatgacaacaattagccaggcgtggtggcgcatgcctgtaatcccagctattcaggaggctgaggcacaagaatttcttgaacccaggaggtggaggttgcagtgagccgagatcccgccactgcagtccagcaacggagtgagactctgtctcaaaaaaaaaaaaagtagttttggtttttaatttttgattttttcttatgttattacatataacgaatgatatgcatactctgaaaaatcatgacataaaggtgaccttgaaattactttgatgttcatttaaactagtctttggtctccactggctaggagaccacatatagcagaacagcagagaaagcaaaacagttaattttcatgtttggcttttgagcttccagggacccaagtcttgccttgaaccgatcttaggaaattcctcattccctacccgaccctgtttctaaactgcatccctgctgaaatgcaatgccactgtaactctctccaatatttgttttcttctttggcttaccactagatgtatgtatatatgtttgtgtgcctgtgtgtgtgtgtgtgtgtgtgtgttgactgcctcatagtaaagcctactcttgagattaagactcctgatagtttagagaacagaaatcttttttagttcctggttattacttgaatttgcaagaggaacaactgctaggaggcctagttaacagtagttagggtctccacccacttgccaagggcaagactagtttacaccacatttggaatgaccagtttcctcccactttagtttcagtgtagaaagagtaggggagacgaactattcaatgtcagcttgggtgtagtgccagaaccgtactcagtaatgctgtcattgctgttggtgcttaccagctcttcagtactggaatagcttcagacctcgagagtttatgactttatcatcaactgggtgtgttgcccttggcacattgccacacagtgcttaatgatgatatatgttctttatcaaattccccccaccaaataatggcattatttacgtgtgagaaagttgcacatttcaccacctcatggtttattagagtgcaattccgtgagaacaactgcctgtgatcctctgtatccccagtggccaactcaggagctcagtatgccctacccagtagatgctcagaacatcattgctgagtgaggaagtcagccatcattttctccctggatagtctctcctgtagataacaggggccgttatcagccaggtttttcatcatttgtggctttgaatttcagggacatgacaagtttgctttttgtttcgttttgttttttttttttttttggttttctagagacagggtcttcctgtcactcaggctggagtgcagtgatgtgatcacagctcactgcagcctcgaactcctgggctcagtgtttctcccatctcagcctttggagtagccagcagtataggtggtgtaccaccacacccatctaactttaaaaaaaaaaaaattgtaaagacagagtctcacttttttgcccaggctggtctcatactcctggctcaagcaatcctcctgcgttggcctcccgaagtgctgggactgcaggtgtgagccaccttgcctatccaacatgacaagtattattctctggcaggaagtgaaattttttctcactgatgattgcacacaaatgtcatatctccatgaggcttctactcactagttttacggctcatgtcaccttgcttcaaactatgcttcagtataattttgaagtgtatatttccattgcctctccttgagtaattgatattcttcacaataagtttacatttattatcacttttatttacttactattattactctgagcagccaatcttatgagaagctcagagtggaacgtgtgggtcctggtaaatatattatttgactcacttccaaacacacttaatattgcctggtgttttgattatttcaaaatatacagatttcttgaaaggcctgcaaaaggaaacaatcaaaattatagcggttaagaatgtgagtctgccttggtttgaattccagatgggccagtccctagctgtgtaatcatgggaaaattattaaatctctagcctcgctttcttcatctgtaaaatgagcatacaggctgagcatccctagtccgaaaatgcaaaattcaaaatgctccaaaatctgaaactttttttgtgcctccatgacgccacaagtggaaaattccacacctgacctcacgtgataggtcacagtcaaaacattgtttcatacacacaatacttttttttatttgtataagtttaagtggtacaagtgcagttttgctacatgaatatactgcatagtggtaaagtctggacttttagtgtctccatcacccaaatagcatccattgtattcattcaggaatctagcatccctcaccccctcccatcttcccacctctccaagcctttcatgtctagcattctgtgtccatgtgtacacattatttagctcccacttctaaatgaaaacatgtgatatctgtctttctgtttctgagttttttcacttaagataatggcctccagttccatccacgttgctgcaagagacatgatttcattctttgttatgactgaatagaattattcaggcacaaaattattaaaaatattgtttaaaattaccttcaggctatgtgtataaggtgtatatgaaacataaatgaatttaatgtttacatttgggttccatcccgtggatgtctcattttgtatatgtaaatatgacatgatatgaaaaattcaaaactctgaaacaccaattgaactcaatttgcagtaagaatgcatacctcacagggttatagtgaggattgaatgagacaatcctagtccaatttctttgcacatagtaatgctcaataattattacttaaatgggtataaactttatagtaatgaggttggggctggaaaaaatgcagtttcataatttcctatagaagtcattcaatcctgactctaaactctgtattccatgtggtggttgggtggcgtgggagagtcctctttatcctgtggggttggtcctatggaggtgtctgtggcagattggcagatgcatttgtcttgtgcatagatggtgtctgttgtttcctctggcagagttcaccagtgtcctaatgcaaacttagtcctcatctggctcctgcacaggctgatctctggctcctttagcccctcatggttcctgttgtttcattttcagagggacccttgtaaggactatagtcctctcttcagctgaccttcaggtccccagtcagaaccaagggaaccgactctgtcccttctcatagcacctgaaaaccccgggaaacgaggggaatgctttgctctcagctactgaggttgtcctgtcaccttctcttctgccctcctttgccatggcataggataatgtaagtcagcaatctcattactcggtatatagccagaggaatataaatcattctaccataaagacacacgcgtgtgaatgtttattgcaacactattcacaatagcaaagacatggaatcaacttaaatgcccatcaatgacagattggatgcagaaaatgtggtacatatacaccatggaatactatgcagccataaaaataatgagatcatgccttttgtgggaacatggatggaactggaggctattatcctttgcaaactaacgcagaaatagaaaaccaaatgctgcatgttctcacttataagtgggagctaaatgatgagaacttaccaacacaaagaaaagaacaacagacactgtggcctacttgtgggtgaagggtggtaagagggagaggagcagaaaagataactatgtggtcctgggcttaatacctgggtgataaaataattgtacaacaaacccccatgacatgactttagctatgtaacaaaccttcacatgtacccccaaacctaaaagttaaaaaaaaaatcccagacaggaagtagggcatattttgcctaatttgcagcttcatcctcactccctaacttacgccactcatgtctcctccatcatcagggacagcaagagtggggaggggacgaggcctgccacatctccattctctgatcttatttcctcttgcctcttcaacagcgctttgtctctcctctccagcttgaagcccttactctggtatgtgatttcaaagcgatgaaaaactggtttcgttagtacttcccttggatctgcccttgtctcccatcaaggcagtgcaagtaaagaatccaagatatttgttttgttggtccactggagggtagagatagagaaaaacagtaacttccccaccacccccaacctcccttgggctgatgactccaaagactgccataaatgaacacttcatagagctgctattaatatgacacaaatctacttgatctaagggattcttttactttcttagggtggtcattcctaagtctttggatttcacagaaaagaaaatatattttaattgaggactgacaaaggttgccaactttttatcaattataagaattgtttttataattaccatcaatttctattatttcttttactccccctctttccaactgtggaaggtaaaattgaagagcaaagaacacttatttcaaagtgagtaaatttagctatatgaaaactcagcagattgccctgagtttccttgcgtagctgcagtccagtggaaatttcttccagaccagcaccagtcgccccagtgacatttagaaatcactgccctggattgtttcagccaccgaaacactcggtgttcactgtcagctatgattatatatgaagtgctttcgagaaccaatgtatagcataacttaggccaaaagaaacactgtgcctaaacactcagccaaggagtgttgagtttgcctggatttctggaaaattgtctccgttccctagttcactgtatttgggtaaacaaaacatggcctcggagagcctttgcgggagaaattataaaaattcagcaaagctttgtgatctcattttggatctcctcaggattcctcatcaagttgcaattaaggagagaaaaattccgccttggggtgggattttaattactcatcatgttatgacttgactttctgtgctgcatttttttccatatcactacttctgtgtttgacagctcctccaaagagtcgctccgttttatgccaggagcgaagtacttactaagtcaaaggaaagcaaggcaaacatctactattgcctttgtgcttttaccagaaaactgggtgagaacctccttttccttttccctgcccctccagcctcagttttatgaccctgtggagccagtggactttgaaggacttctgatgacacacctgaacagcctggatgtgcagcttgcccaggagctcggggacttcactgatgacgacttggacgtggtgttcacgccaaaggaatgtaggactttgcagccctctttgccggaggaagggtaaatagttttctaaaatgtagatgtgattgggattgtcatgattgttttcaataagtgggtaggggagatgccttcaatctgaacttaaaaataaaataaaattactcaatccattcaaatgtgtgggacagctatatgatatcatcatgtaagtatagatagtttttaaattagtttggccagagattttgaaaagctatgtgaagactaagccagtgcaagggatgcaggaggaccaaatgaaatgctcaagaggaggttaaaagtgcaggctctggagccagaccacctggctgccagctcagtgaccttggctgtcacatgacctcccaaatcctcggtttctccatttgtaaaaatgtcaagatttttaataataattactgaaatgccaccatccagaagcattttaattgcttacagttatgagactggatcaagttagaaacataaggtaaacccacatttattgagcatctactatgttctgggtactgagataaaaagatgaataagtcaaagtccctcctttaaagaaagtgtcatgcagtgctaaaacagtggggagagctctgtagaataaatatgtgaatagctaattagggcttgagtttctatagttggctcttctatatgtttataggcttgggcattagtttttggcatcaaactaactgtggaattgtagctaaatgaaacgcctgttgcttctaaaatgtaaaaaaaaatgtctctttggaggtttaggataaacttttatttacatttattttaaaagccaaattaagattcatatcctcctggacaggttccatcttctcatcttccccagaaggtcccagaaagaagatcctgacacacagcccctgccctctttactctgagatattctagttctattttggattttatttcatcacagtttaaggaggttggatgataatgggctggtattattgtgaaccgttgctctcttgttcagacagtcctcactcacataggagaactgaccatatgtgtagctctgatgttttaaaaatacacacttcccaggaaagaaaaacattgtcatttttgggaaacatactcccccattttcagtccatttattcaggtatgactttagtataagttaacacctactatttcatctttagtgaagaatcatttaatttattcctttatgtaaaatttatggatgtttccaaatatggtcagaatcttggaaaaagctgtttaaaatgcttacagtagccagtcaccgcagcttgttcctgtggtcccagctacttgggaggctgaggcaagaggatcacttgagcccaggaatttgagttcagcctgggtaaaatagtgagaccctgtttcttacaaaacaaaaacaaaaaacagtacaatgaatttagaggaaggaggaggtttttttttttttgaaatttgataaggaagataatttctttacttagcatcagttttttagtatactgttgccttgtcaaaagaatttataggtaacatacctgtctgatgtctttaagacagcctctactatttcagttgttgccaaaaagtcttctgtataattaaggcaggggaaggtatcatcatcacaccagagtaaacaatagctgactcctgttgaacaacctgtgcctagcccagaactttatgttgagctgtgatggcgtggtagtgaaaaacatgaacgctacaggtgagctgcctggattcaggtccctgctccaccacttgctgtgtgacttggaacaagatccttaccatctcatttttctgcaaagtgagaataatagtaatgcctgccctatggtgctgattgagaattaactgaattaatacatataaagtgattgcctcagtgcataatgcacagtaaatgctacctaagtgtaaactattaatatcatatatgcgtcttattgtgtgccaggcagtcttctaagcactttgcacactaaccgatttaatcttcatcaaagctgtctactaaaaggggcactcttactactctaacagctttaaggagaggaaactgaggcacagaagggttgagtgactggcttatggtcacatagctataagcgatgaagctgggatttgggcaattagggcccagagactgcatgtgtaacctttacaatattttatctaatactaacagcatgtctctgttcttacctccttatcacagatgagaaaattaaggcttgtagcatttaagcctgtttatttctggtactaatgcatttgcaacaatagcaaaaagctttgctacaattgttatttttgatttcaagactctgaagcacttgaagagtattgctcatggtgcattccttaagtagacatgacaggaaccaactgaattaatgatcaccaacaaaagccagtgtttgcaatttcatcaaagcataagacaactgttctttttcctggctttcaaaaaggagaacacgcgtgtcctaacaaggttacacatgcataaaaaatatgtccaaattaccctgtcagagataggtatttatacttattttccttgttttgtattcgaatacagctagttctacctgtcttgtgtctgaatgccttcggggatagttataatttaacatgattctgtataataaagaaaacccacaaagcaaaaaaatgccaacatgtttgtctcatcaaagtaaaaatgtttattgccccaggaatacttcagacatttggaatgattgggcaagaacatcctaagcattctcactgataaggatttaaattcgtgtcatgttccttgctcatgattaggggttgttttgttgttttacccagtaataacgtgtttatttcattttctacctcattagggttgaactggaccctcatgtcagggactgtgttcagacctacatccgtgagtggctaatcgtgaaccggaagtaagttactttttttccactttttgtatataaatattaattttatattgctagtttttaaatatttcttaatactttgaacagttctaggtttacagaaaaattgcatggcaaatagagttctcatgtatgccttccttatccccactccatatcacacacacagttccccctattatgaacatctcactttagtgtggtacatttgttacagtagctgagccaatatggatatgttgttattaactaaagaccatagtttacattaatgtttactttttgtgttgtatattctatgggttttgacaaatgtgtaatgacatgtatatgcctttacagtatcatacagaattgtttcactgccctaaaaatcctctgtgttccacctgttcatcctccctccctggcaaccactttccttttttactgtctccataattccaccttgttcttcaatgtctttttgtggcttgatagctcattttttttattgctgaataatctttcattgcatggctgtaccattgtttatttatccattaacttactgagaaagaaagttctattttaaacataaagaatagactgcaagcttgcccaacccctagcccgtgggcaacatggagcccaggatggctttgaatgtggcccaacacaaattcataaactttcttaaaacattatgaggtttttttttttgcgatttttttaaagctcattagctattgttagtgttagtgtatttgatatttggcctgagataattcttcttccagtatggcccagggaagccaaaagtttgggcacctggaatagagcctttttgttgtcttctaattctgatgaattcccagggggaaaaattaagtgaattgaaacctggcctcagcttcagaggtggcattcgagtttatgaccaagaaataaattacttgctggccttccagtaagggatctttctctcctggattaatcaaaccttctgtgacattgttctgagctttttctctccatgccatggacctggacagcactctctcatgagaaacatctatgcacattgaaattctcagcctgcatgggtgtacctgttggggagtgagatgtggactctctacagattagggcacaccccactagagacacgtcacagaacctttgacaagacattagtagtttaaaattctgatagcctcactcctcctatacctcagtaagaattactattctatggggtaaatgatgaaagactttgaggattgggttttatctagctcctggaagggtgccattgagtttgtgctgaggttttctggagtaatgtcaatatgcacacattttcagcagcagaaaaagagaaagcattcattattaaaagttattaagagaaagttagatgccaatccatcatctgttctaaaatgaatggaaaacaaagtttgctgggcagtcagataaaattatggtttgctgataataaataaaagatttcagaacaagttgttctcaagtttttaaatgctatcattagaggtactttctggacattaaagatctaaaaaaaatctgagaaggaacaaatagaaagatccattttgatacatttggttttcagatttattttctatttcgggcttgtccactttttcatttctcatggcaatgcacgcttcttggagtagtgatttttcttgatcttgcacaaatgtaagagaaaaaaatgactctttttggaatactcgttgaaattttagaaataattatgaaacacaaatcactcagtttcactctagacagataatcatcatgaacatttgatgtctgtcctttgaatagtgttgggtttttttggtatatatttgcgtgaaaactaaataagattataatatcatttttgtaacatgcattttcagttttcacagtaaagagtgattctcttcctttgctattaaatatgcttcctcaatacaatgattgatgattgcataatatatttataccaaaatttatttaaccaattttaatatttaggtgattccttccttttcagtgttgtgcttaaaatgcaaaaacatccttctcaggaaaaatttgtacatatttatgatttttttctttggaattaattcctacaagaggaatttctatgtcaaaggatatgcacaaatttaaagatttggaatactagatcaaacattatgccgggcgcagtggctcacatttataatcttactcagcactttgggaggttgaggtaggaggatcccttgaacccaggagttcaagaccagcctaggcaatatacagagaccccacctctaaaaaaattttttaaaaaattaactggatatgatgacatgcacctgtagtcctagctactcgggaggctgaggcaggaggatcacttgagcccaggaggtcaaggctgtagtgagtgacgattgcaccactgcacaccagcccaggcaacagaggaagaccctatctcaaaaaaaaaaaaaaaaaaaaagccaggcacggtgctcatgcctgtaatcccagcactttgggaggccaagacgggtggatcacctgaggttgggagtttgagaccagcctgaccaacatggagaaacccagtctctactaaaaatacaaaattaaccgggcatggtggtgcatgtctgtaatcccagctacttgggaggctgaggcaggagaatcacttgatcctctaaaaatagctaaactgggaggcagaggttgtggtgagccaagatcgcgccattgcactccagcctgggcaacaagagtgaaactccgtctcaaaaaaaaaaaaaaaaaaaaaaaaaagattattgacactacatgcatgaatcctcaagaatattagatgttataatttatcaacatttccaattttatttgataaaaggttgtcttttttttcattttcttttactattagattaggcatctttcttctatatatttcttggccattttttatttttcctggtgctctgcttattcgtgaaatttgtgcatccctattaatgtatttgtctagtctgatttatttttataagcacttttttggtaaagatattaagccttgtctaccatgtattaaaaatgtcttccccagtatgccttttgtcttttaaagttgtttttaattttcaacattcagaattatttatgtcattaaatctatattaatatttttccttatgtttaattttggcatcatgcttaaaatttgattcacaaacttattattattttctaagagtatgggattaaagcattaatccagatcattagccacttgactgttgcttctgttcccttatgtgtctccatttgtttttatcttttctacagaagcaatggttacccatatatttattatatgcaagtttttgcatcttgttcccctaaaaaagaaaggaatatgtgttttaattttatgtttggcaacattctagggatgggattaccattggcccagttctctgcacccctgtgtaatggagcagttcccttcttaacggtcacctagtggacagggagaagtgtacaacttcagaactcattgtcagtttctggcaagctttcttgtagaaaagttgcatctctttctatccctctgcctcattctcttgcactctgaatctaacactctgcccatgaaaactaaaattcctagcacacactcctcccagggatcattctgtctctatatgcacctgtcgtattttatctgtggggagaatccagtacactattgccagatgtccttcatctcccaacctcacacagtacatttttagcttattgttttctgtgagttgtatctgtattgttttagaatgatggtagaaggagaaggacaaggagaaggtggtgattcatataaatgaaaccagctggaagctgtgatgctttcatagataagccactattatgaagaaggagacttcagatttctgtatagacactgaccagggactcgtgggcaggaaggtgtgcaacaccttcttatctttattcagtgagttcccctttggggagacaaagtttggtacatccttctctttccagctccatctgatccacagaggttctgtccagattcaggcattaagttatctcttcatttggatgagtttccagtttttctgtgtcttcataagtggtttactagaaagtcggaggaggatgcaataggggttgctggccatttgttaattagtgattaattatttagctctcctttaattggttatgtgccaaatcatgtatgattgttttgaaagaaatcaagtaatatggaggtgcattaaggaaaaggcaaatctcatgcctcactacttaccagtgtcctacccttcccttaactcactcttcactgcgtaaagcccagctgtgtagcttccagatcttttcataccctcacaaaaaatatttgtctatttatatttttcacataaagatatatgtattaatgtatgtacttatatattacaaacatttctttaaaataactgtccatgtcagagctatatcccattctactgaaatgctgcctagtattcaaagggtgaaggaatgtgtcctaagttactgaaactaaatgaccattttggttgtcaccatttttcataattgcaaataatactgaaacaaacatatctgcacatttgccccatacatgtgtgtgaatatttctgagggtagaaatgaagccagtgtacatggtatgctctgataggtactgccaaattcttctccagaaaagtcgtgctgtttcattccattaccaactgggcattaaactggcgtgttcccatattcttgccagtgctggatattatttattaaaataaaatttcagttcctccagtcttcttttagttattattttaatctggaagctattacacctactttctgaatacagtttcctatcaccaagtttcctttccttatgtgttctaaaatcccagttaaatatgcacttaaccatacaaccgtaagtcccactcttgagtatttacataaaacctatgtgcaaatacagcagtttagcagttttatttgtaattgccaagactgcatagcagttttatttgtaattgccaaaaactggaagaaaacccagattgtactcagttgggtagtagataaacaaactctggtaaatccatacaatggaatactactcagcagtgaaatggaacaaacaattgatatatacaacaacatggatgaatctcagatacagtatgctaagtgaaagaagccagacaaaggccgggcatggtggctcatgcctgtaatcccagcactttgggaggctgaggcaggtggatcacttgaggtcaggagttccagaccagcctgaccaacatggtgaaaccccgtctctactaaaactacaaaaattagctgggcgtggtggcacgtgcctgtagtcccagttactcaggaggctgaggcaggagaatcgcttgaacctgggaggcggaggttgcagtgagctgagatcatgccattgtactccagcctgggcaacaaagtgagattctgtcttaaaaaaaaaaaaagaagaagaacccagacaaaaaagataactgcatgattccatgtatctgacattctggaaaagatgaagctacagggatggaaaacaggtccatggttcccagggtctgggagtggggaagagggctgactacaaaaggacacgggagtgccctttgcgtggtgctgggactgtagtgcccatgatgtaaaatctgccttggaccattacattagaagaaatcaattccagttatcccaatattccctccaagtgaaatactttggtagcatatataataataattcaataagtattagctattatatttattaagtagtacctatcagaaaacatacttatattagcatgtcaaaggaatgaacacaaaattctctcccatatattgaacgcaccatggaggggggacctgccttcctctggaggaccatacttagtgaagccactttgccttataaggacatgcctttgttatccagaaccaagcagtcaaacactgatttagttagctcctttatttctcagttatctcctgctgatattacatttctccataatatctagagataggcttttatgtccttgctagctgtggtaatggttttgaatcccacttagggggcagaggagtagagtaatggccacttgtgttccctcccaccctcatcattctacagggcatttgccactcaagtactgtaattgagacatttaaatcatacaaataatgctgcccatgaaggatagaggaaatttttagatttccttttaaacctaacagagaaagattaagttacataaaaatgtaaaatacatgatctccagtacattgaaggaaatgtattttcttacttgaaatgtttgtgttacttagactggaagatttattaaatgatttccattctatcactcatgtttacagcaccaaatttggtgtccttgttctaaaaacaatagtacttttctccccatgacttttgaaaatgattactggtttactgattagcatggcgccatgtttgcttgtttgtccaaccttttatctgcatattttgataatgttgtgtggattaatatttgatgacatcctttgggtgatattaacgattttaagctttatttcttctgtcattttctctaaatgaaccaaagagggataaacttcagaatgtttttgatgcctggtggagagctgaactcttaagaaattaaacttgtttacatactatatttattcttgccgcagagacagtgaaacatttcatgagtgttatgggcagcatcataaaagcctttagactttgtttttcatctggggtgattaaggtaattctgaaggaaggttgagctcaaggagagctgagatatcaaggaatggggtatcatctgttttattactccatattttactcccagtgaagtggtaaacaattaaaattcaaacacatcagtgcatataattcagttactcccagaacaccataaaaatgtttccctgatcaataattgcttattatgacatgcatttgttgtgctagctgtcaaggtgcttagctatttgctttctaaaagtatgaaaagcacgcccggctcatcagcctatgtggtaacaaagagcaatccagctgtggatgtcacagagccactcttgacctgttgtgcatagactccctccccacaaatccaaacccactaagactctccaggctctgttaacacacaccagcctggttcagcttggatgccctcctcacaccatgtgggttctgattttccatgccaggcagtccatcttaaatggatgcatcctcaccgtgtttgggcttcaacttcctattctggacctcctcggctactccctaccccaaggcatggagggctgccttgttctgatgcaccttatgattttagcaccaaattgtacaggaagggagagaagggaaaggagaaagaagatgtgaaaggaaagagagggtagggaagaggaaaaagaagatgaggaacacgtattattttctaatcctcacaataggtcctcaaaatgagcaacatttccccctatttcatacttgaggaagctgtgactcagagagactaaggcacttgcccaaggtctcttagtacattaaggagccagcgtctgcacccagttccttctgactctagagcctggattctgctggctgcaccacactgtctttaaagagaacactctcaaaacgcgcttggtctttggattgtctcaaatgtgttagaatagtgttttaagaaaaggaatgcagatctcctgggaagcaataggtcgagttcatttcatgagaatcatttttctagccattggcctacttccccatttttctcctgtctgcatctaggtgcaacaggaacttggctttatttgactccattgccagggtggggtaatgaagctgggactctcttgtagccagcggcagtgagccagcagtctcactgcctacccagtgatggttccttctgtggccagcacttctggaatgagtcatctttacatgtttgccaacccttgtcctctcctccccagccaggttcacccttgctgctgtcaaggagctttgagactttctgagatttttaaatggggaagtagatgttaaacctagtatgaggaagagagggaaagtttgctctggtttcaaacacacagtcatagaagatgctagtcttaatgctttccatagcaaaaaccctgaaggcttagagtgtacacattgtgaactgaacttttaacattattgtgtaactcatttgttaatgcctatttgtcattgactgtggggtccatgtgaaaaactcccacaaacactctaacaaaatggaagacagaaaagaaagcaagcatcatttgtgtacaatagccaaagaacaatagccaaataaatttgatggtctcaaaagttaagcatcttttgaagagaaaatttgattttagggccaggtggggtagctcatgcctgtaatcgcagcactttgggaggcagaggcgggtggatcacctgaggtcaggagttcgagaccagcctggccaacacggcaaaaccccgtctctactaaaaatacaaaaattagctgggtacggtggcgcatgcctgtgatcccagctacttaagaggctgagacaggagaattgcttcaactcgggaggcggaggttgcagtgagccaagatcatgccgctgtactccagcctgggtgaaggagccagactctgtctccaaaaacaaaaacaaacagaaaaaagaattgattttgattttttcagatacagtgcatgaactttttatcataaaatattaaagctggggaaaatatcttagaattcacctcatgttcatgctttaccctgtgaagaaacagaggcacagagagaaataacttgaggataatggaaacaagcacacatctgtaagtgtgtgtgtgtgtgtgtgtgtgtgtgtgtgtgtgtcagagagagagagagagatgttcctttgtaagtaaacactcttggaaatagccgcattttattataacacaaaaagtaatgctaaagctgatatagttctggttgctaagcttcacacacaaaaggtctttaggtagctgcttcctaatttttatttctgtggcccaaaagtctccttgtaaaccttcgtgtcatgtcatactaaacctttgacatcaataccctttaaaatgtacaagtccttaaaaaaaaaaaaaaggcaaagggcaaatactaatgtgggaaatttgaattttaattaactgtttgtttcaatgttaggataaattaatgttagataaattctttggtaatttttccccctaaaattggatttttcaagaaacatcactggttcagtatattgttatttggggtagcataattttaggcgataacttaatatttgcatatatttgtcactactttgagttggtttttgtcccctgacccccagccaggatgttagatcacacagatttttttttctttgagcccttagggagagtccaaaacagtcacttcatgtactaggaaagtttacccagtcagcacacacagatatgttgttgcctacatttatatttgtgagagtgactgttaagaaactagcaggtttataaaatccgtgtgagaatttctctcaaataactgttaatggacaatccagcaatcctcccatctcaggctcccaagtagctgagactacaggcaggtggcaccatactcggctaattttttgtgttttttgtagagatgcggtttcaccatgtcacccaggctggtctcaaactcctgggctcaagtggtgctcccgccttggcctcccagagtgctgggattacaggtgtgagccactgcacccagcctgtacattttccttgaaatcgtttttggatgtttagtcttatttccttattcagagttcacctgtttattttttttttcatttccccaatttagcctgcgtttcacccagccctagcaatataggtttgggtcagagaaattcaagcggccaggggatgctgaagatggcccattatggccgggcgcggtggcacacatctgtaatcccagcactttgggaggccgaggcaggcagatcacaaggtcaggagatcgagaccatcctggctaacacagtgaaaccccgtctctactaaaaatacaaaaaaattagctggctgtggtggtgggcgcctgtagtccaagctactcaggagactgaggcaggagaatggtgtgaacccgggaggcagagcttgcagtgagcagagatcgtgccactgcactccagcctgggcgacagtgagactccgtctcaaaaaaaaaaaaaaaagatggcccattgtggtaagccttgacttgaattagtcaccaagctagtcttatctcttttctaggctaattcttgttttttgtttggctcaaaacaaattgtttgtcttcagaacacaataaaatccagggagagtgtcctgttcttcctacagacgtcactgggacatcttattctttaattaattcagtcaactaaaattggtcaaatacctgctctctgtgccagagttataaactttgtatttgtataattgctagtagctctcttacatttcttactttatctatctggcatttgatctacctaataccttccaatatcacctcatgtccctttaccagcttggtggtttttctatagttcaggaaatcaaacaaaatggtgtgtgacctggaggtactagaaaaacaatagcaaaccaactccaaagccagcagaagaaaacaaataaccaaaatcagagctgaaaaaaattaaaacgtgaaaatccatacaaaagatcaatgaaaccaaaagtttgtgattcaaaaaaaaaacaaggttgatagatcactaactagattaataaagaaaacaagagagaagatcgatccaaataagcacaatcagaaatgacaaaaatgacactacaactgatgcctcagaaatataaaaaatcctcagagactgttataaatacccctatgcacacaaactagaaaacgtagaagaaatggatagattcctggaaacacacaagccccctaaaattgaagcaggaagaaattgaaatcttgaacagaccaatagtgagttctgaaattgaatcagtaatacaaaacccaccccaaaaagcccttaatcagatggattcacagccaaattataccagatatacaaagaagagctagtaccaatcctactgaaattatttcaaaaattcaaggaggaaggactcctctctaactcattctgcaaagccagcatcattctgataccaaaacctgggagagacacagcagaaaagaaaacttcaggccaatatccctgatgaacatcgacacaaaaatcctcaacaaaatactacaaaccaaatccagcagcacattgaaaagttaattcatcacaatcaagtaggctttattcctgggatgcgaggttggttcaccatacacaaatcaataaatgagactcatcacatagacagaattaaaaacaaaaaccacaggataatctcaatagacacagaaaaggcttttaacaaaattcaacatcccttcatgttaaaaaccctcaacaaattaggcattgaaagaacatacctcaaaataataagagccatctattattcaactatccacagccaacatcatactgagtgggcaaaagctggaagcgttcctcttgagaactggaacaaaacaaggatgcctactctcaccacttatatcaacatggtactggaagtgctagccagagaaatcaggcaagaaaaagaaataaaagacatcccaacaggaagagaggaagtcaaactagctctgtcacagtgcaggcaatataattctgtacccagaaaacactgcagaccctgctaaaaggctcctagaactgataaacaacttcagtaaagtttcaggatacaaaatcaatgtacaaaagtcaataacatttccacacaccaataatgtctaagttgagggccaaatcaagaatgcaattccatttattttatccttttgaataaaatacctaggaatacagctaatcaaggaggtgaaagatctctacaatgagaattatgaaacacactgaaagagatcagaggtgatacaaacaaatggacaaatattccatgctcgtggataggaagaatcaatattattaaaacagccatagtgcccaaagagatttttagattcactgctattcctatcttaattagcaacatcattttttcacagaatttaaaaaaaaaaacctattccaaaattcatgtggaaccaaaaaacctgaatagccaaagcaatcttaagcaaaaagaacaaagccggtggcatcacactgtgtgacttcatactacactacaaggctacagtgaccaatacagcacagtccaggtacaaaaacagacacgtagaccaatagaacaagataaagaaccagaaataaagctgcacgcctacagccatctgatctttgacgaagttgacaataacaagccatgaggaaaggtctccctattcaataaatggtgctggagcaactggctagtcatatacagaatattgaaattggacccctccttttaatcatatacaaacattaactcaagatggattaaggacttaaatgtaagacctaagattacaaaaaccctagagaaaaaaactgggaaatactattctggccattggccttggtaaagaatttatgaataagtccccaaaagcaatggtaacaaaaacaaaaattgacaagtgggacttaattaaactaaagagcttctgcacagcagaagaaactatcaacagagtaaactgataaccaactgaataggagaaaatatttgcaaaccgtaaatctgaagaatgtctgatatccagaatctataaggaacttagataattcaacatgcaaaaaaccaccccatttaaaaatgggcaaaggacatgaacagatacttctcaaaagaagacatacatgtggccaaaaaatatatgaaaaaatgcttaacatcactaatcattagataaatacaaatcaaaaccacagtgtgataccaactcacaacagtcagaatgcctgttattgaaaagtcataaaatagactgggcatgtggcttatgcttgtaatcccagcattttgggaggctgaggcaggaggattatttgaagccaggaggttgagaccagcctgtgcaatgtagcaagactgtgtctctacaaaacatcaaaataaatggaaaaaaaaaaagaaaaagaaaaagaaaattaactgggtatggtggcgtgtacctatactctcacctactgggaggctgaggtgggaagattgcttgagcctaggaattcaaggctgcagtgagctataatcacaccactgcactccatcctgggtagcagaacgagaccctgtctcaagaaaaaaaaaaaggcaaaaattaacatgttggaaattagttcagtcactatggaatgcagtgtgaagatttctgaaagaacttaaaacagaactaccattcaacccagcaatcccactactgggtctatacccaaaggaaaataaattgttctacaaaaacgacacatgcactcgtatgttcctcacagcacaattcacaatagcaaagacatggaatcaacctagatgcccatcgacagtggactagataaagaaaatttggtacatatacaccatgaaataccacacagccataacaaagaacaaaatcatgggggtttttttgcagcaacatggatgcagctggaggccattatcctaaacaaattaacacaggaacagaaaaccaaataccacatgttcttatttataagcaggagctaaacatcgggtaaacatgggcataaagataacacggtagacaccagggattactaaagaagggaggatggaagcaggtgtgggttgaaaaactgcctattgagtaccatggtcactatgtgggtgacgtcagtatcatgcatacatcaaacctaagtgacatgcaatttacccatgtaatgaatttgcacatgtatcccttgaacctaaaataaaagttggaaaaaaataaaagataagatatcccgtatcctcaataaaaataaaagtggcgtgtttgtgcacttgactttgtaacatgttttccaaagatgtctttgagtcataaaaatgggaaatacacatgttggtttctctagtcatcacttgacaacttacatgttttacctttcttatgatggtctgtctcatttcttcagtgacagggctagacattctgttttaaactcttcccacagctgtatattattcaacacaactttaacagagttcatagagtggagattgaggatgtttgcaaagttaaatcatttatttttattttttcttaaccatgtcccgcctgctttattcattattaagaacattgatgtgaagattaaatggttttctctatttttatcttcaaacgatctctatttgtggcttctgcacattgctagatttattccagccacttacactagggtcatagtttagcttcagctcggagccaaatgccccacagctgaaatgaccgcacctctgaagtggcattttcccaggccatgcctccctttaataatgagccagccagggggtaaatttgtatctcattacaacagagccttgtattaggcctggagaataattaaatgtgaggaattataattggttccctctttgaaagctctctcagcaccatgtctacacttaagccattacttttatttttaatctaatggtttgccgctctctctccctctttctctctccaaattaaatatcaaccataaaagaaaccaaggaagtccagaaatctgtggctttaaaaagactggatctcgaaaagattttcacaagacgcttccgaaacagacgtttgagtcggaaaccttggagtgcagtgaacccgctgctcaggtatttcctgtcaacaaacatggttaccaggttactgggctcttctgcccagggcatgctgtcagttttacaaactagaataaacgatagacgcatagaaagtttgagtaggaggaactttaccatctgagtcagtgattttttttttcaaacttatttgtagctgtagaaattggtgttcaaatgaaaacccagaaacccaatgattaaaatagaaaaaagtggaaaagctctaactgggggacagagacaccttgggcccatccctacgacagttcctgcagagactcttggtgcccctaaggcaaactacagagtaatgaaaagctctatgctgaggccagaatacctgcattctcctagtgattctaccatgtactaactctctaacttcaagcaggataattaaacttattgggcttcagtttcctcccctgggaaacaaggatggtaatactaactcatgaggttatttgagtattaaatgagttaatatccataaagaattagaataatgccaagtacacttagtgcctagtcaatgctggtcactgttattgttattgtcattattctttttcttttttttttttgttgagacagagtctcgctctgtcgcccaggctggactgcagtggcacgatcttggctcactgcaagctccgcctcccgggttcacgccattctgctgcctcagcctcccaggtagctgggactacaggctcccgccaccacgcccagctaatttctttttgtatttttagtagagacggggtttcaccgtgttagtcaggatggtcctgatctcctgaccttgtgatccgcccgcctcggcctcccaaagtgctgggattacaggcatgagccaccacgcctggccagttgtcattattcttataaagtaattacagtttaaaattcaagttaaagtgtacatattgtgaaatgagcttttaacactattctgtaactaattttttaaatgcctggggtcatttgaagaactccagcaaacactctaacaaatagaagacagaaagaaagcaagccttcatttgcataaaacggccaaagaacaatagccaaataaattccatgtttccaaaagttaagctctatacacctatgctcacagcagcattattcacagcagccaaaaagtagaagcagcccaagtatccatccataatgaatggataaacaaaatgtggtcgccaggggctgggggagggaggagtaggaagttattgtttaatgggtagagtttcggcatcccaagatgaacagcattatggagatggatgctggtgatggttatactgcagtgtgaatgtgtttaacactactgagctgtccaacctgcccattttatagatgagaaaaataaaattgagaagaaaaaatttgttcaagtttgcacagaacttcttgtaaactaatatagttttcagcttccatgtgtcttcataatacaggaatctcaccatgctggaaatgattcgaggtttttaaataatactaatttttcagacaaggtggtccccctaaagcaaagcccactacttacttggagcttcacagtagaatcagccatcatttccagcgctaaatatgacaggcttactgagggatagaatacctggatgctctgctctatgggagatttaaggaatttttcatcagtaattttgactgaattccattttcaccctacatgctgaccaattaaattgttcctcttaatgttagtcagatagaagccacggtaggtatttcagcagaagaaatttaacacagggaattgattaaaccggttttggaggtctgagagaaccaaaagggaaaaatggaggctatcctaaaatcgtcattatgggaaacagcacaccagcctggggctggggtatacggcagtggttctccacttcagcttcatcagaatctcccagagggtttgttcaaatataggttgctgggccctgtctgctggaatttctgattcagtaggtctggagggtgaacctcatactttttaattagcatttcctaagtgatgctgatgctgctggtcccaggaccacaatttgaggactgcaggtctaggggaagatcttggagttgtcagaacgtagaagctcagaagaggagcctgagagcaaggactgaaatccctgagaaggtactgcccagctggtggtgttgtctcaagatctcagagggaaaaacctcatgaagcctggactcacgcctcacaggaggagaaattgcccggctggtgctggtaccttcaaggaggtaagataagggtgattctggaagtaccaaaagaacctgaaggctagaaccagctgtcactacgaaggtgagaggaatagcaagaggaaggagccaggccctttgacctccttgaaccatccggtaaccctgtagtgctccctattgacagaacctaaagggagcagcagacacagcggaaatatgatttgctgacctagcatcaaagaacaaggcataaaagggtgaatttggagcccagaaacaataggtgaagaccagcgtacacacaaagcacacgctttcctgcagcatactagcagagaactcaagtcactgtgttgtgtgtggttttttttgttttttttttttttttttttttttttttttttttttttgagatggagttttgctcttattgccaggctggagtgcaatggcatgatctcggctcactacaacctccgcctcccaagttcaagcgattcttctgcctcagcctcccgagtagctgggattacagacatgcgccaccacgcctggccaattgtgtatttttagtagagacagggtttctccatgttggtcaggctgatctcgaactcctgacctcaggtgatccacccaccttggcctcccaaagtgctgggattacaggtgtgagccaccgcacccggcccactgtctgtgtttaagagccaacttgatcatatgatccagcagtctcactactagatatatgtccagaggaaaggatatcagtatatcaaagagacatctgcactcccatgtttattgcagcactattcacagtaaccaagacgtggactcaacctaagtatccatcagcagaagaatggataaagaaaatgtggtatgtatacacgatagaatactattcagccataaaaaaatgaagtcctgtcatttgcatcaacatggatgagtctagaggataagtgaaataagccaagcacagtaagactaatactgcatgatctcacttatatgtggaagataaataagttgatctcatagaagtagagggtagaagtggtaactagatgctgggaaggatggatggagaagggaatagagaggttggttaacggttacaaaattatagctagataggaggaataagttctagtatttgatagtactgtaaggtgactagaattaataataatttattctgtgtttccaaatagctagaagaaaggattttgaatgttcccaacacaaagaaatgataattgaggcaatgggtacactaattaccctgatttgatcattacacattgtacacaggtattgagatattacactgtattccataaataggtacaactattatgtgtctattaaatttttttaaagagccaaattgtacaaaagttgtttgttttgaaatattggaataatactcatcatggagagaatctcagactgcgagatgacagcaatgttttcaattccactctcattcttgtgcaccttcttattgagtagaatggtgaggccacatagctagatttataaaatttaaacaagtatatgataagattccttggtacacgtagattttataaaaattagattatattatgcataatattgcaaaacttcctttttcatattagcaatatactgtgattatctttctcttccaattaatacgtgttctttcttttttagagacagagtcttgctctgtcgcctaggctggagtgcagtggcacgatcttggctcactgcaacccctgcctcccaggttcaagtgattctcctcccttagcctcccgagtagctgggactacaggcatgtgccacgacacccggctaattttttgtatttttagtagagacggggtttcaccatgttagccaggatggtcttgatctcctgacctcatgatcccccggccttggcctcccaaagtgctgagattacaggcatgagccaccgcacctggccaggttctttcttttaatggctacataacattctattttatgaaagttccaaaatctcttaacacttcctttttgggggcatttagtttacttctattgttttgctatcacgaacagtgtttcagagatgcccttgccctcacattcttgcacacttgccagttataccctacggataaattcttagaagtgaaatttctagattaagggatgagtaatgttagatttttttacttatatgtatcttgatatccttttaaataaatttgggaaattaaagtcattttccttaaactcttataaattttaagaaaaacaaaagtattaataatcgaagtgttaatattgattatttctagcacattcagtttggggaaaatttatgatctagtagagtagtacttttgtgaggtagatgtcacaaaaaatgtgtagtatggagaaattgtccagtagtatgtccatttagtagaattttgagaataacattttgccataaattttatagatatttaccattaatccatttgtagtcctacaacatatagttgattacagttatacattttttgctgagtctttggttcaaagcatgcagttcccaattacaaagacattcctaatggaataaaacatccactttgtgactgatttaaggttgttttcttaaagcacaccgcagccaaaagtggacacagcttgaatagcaaattttttcctttttgttgttgttgcttcatccaataactgttaccaaattcccgtagaaaagtgttgcccactcccacatcgacctttggaagcataacattcagctttggtgtctatacacaatttaatttggaaggctcctcacaaatcatcttattttccagtttcaaaaaccaagttctgagtggagattaagacagggtctctttatttcccagtgcagtctcctatctatttatttgtgaatgaatgaattagttaattaatgagccagggtttcactttgtcacccaggctggattgcagaagaagtcatcgtggccaagcgtggtggctcatgcctgtaatcccagcactttgggaggccaagacaggtggatcacttgaggtcaggagttcaagaccagcctggccaacatggtgaaaccctgtctctactaaaaatacaaaattagccaggcgtggtggcgcgtgcctgtaatcccagctactcaggaggctgaggcaaaagaatcacttgaacctgggaggcagaggcagcagtgagctgagattgcgccattgcactccagcctggccaaaaaatgtgaaactccgtctaaaaaaaaaaaaaatccaatctttcctattggctttattaaatacactttaactttagaagcttagaagcacaataattagaactggcctaactttaaaaaaaattttcacaaagaaattagtaacttgtagggtcatttgtaatctttttctctgttgatttttacagttttaaaaagttaatacaataatttatttacttattttttgagacggagtctcgctcttgttgcccaggctggagtacagtggcaccatctcgggtcattacaacctccacctcccgggttcaagcgattctcctgcctcagcctcccaagtagctgagattataggcactggccaccatgcccagctaattgttttgtatttttagtagcgatggggtttcaccatattggccagtctgatcttgaactcctgacctcaggtgatccgcccacctcggcctcccaaagtgctgggattacaggcatgagcccaatattttaaaaatagtacattattacagaagctagatgtgcactttaaattattatcagaaaattagtatgacagacaaattctatgattgtcccatcatctgggcctgtgacattcacacctttgtgatgttcatccccgactgtgggtgggacctgggacttgcttctgtcaaaacaatatggcaaagcatgagaggatgtcacttgtgatcatattagatagcagccaaaatggattaaagacttaaatggggccgggcgcagtggctcacccctgtaatcctagcactttgggaggttgatggcggcggatcacctaaggtcaggagtttcagaccagcctggacaatatggtgaaaccctatctctactaaaaatacaaaaataaccagatgtagtggcggacgcctgtagtcccatctgctagggaggccgacgcaggagaattgcttgaacctgggaggcggaggttgcagtgagctgagatggcgccattgcactcaagcctaggtgtcgcagcaagactcggtctttaaaaaaaaaaaaaaggtaatcatacctcactgcagccttgaactcctgggcggggttcaagcagtcttcctacctaaacctcccaagtagctaagactgtaggtgcacgccaccatgcctggctaagttttgcttttttttttttttttaagagactgagtctcattgtgttgcccaggctagtcttgaactcccggcctcaagcagtcctcccaccttgtctacccaaggactgggattaaaggcataaaccactgcacctggcccagtctcctttttgttacaacttcctccagctctgttttgctctggtgtgagacatgagcatggttcattaagaggcttggcccccccagccccaggaaagaacaagccaacaaccgataggaatgtagtactgtttttagtcctttcctcaggactggtttgtctgcataagatgagtaactacctgcttccaggtgagaagaagacatttaattttagagtagtccagccaggaagctgagatgtcattcttatcaaatccgcagtttcttcagaagacttgaggcctggctgagattctgtagtcccaaattggagcagtcttgagacatccaagattcttcggttctcattttagacttgccgtctctctcacaaagacccactgttttctctcacaggcaggcccccgccacttaaacgtgctgtgcgacgtgtctgggaaaggccccgtcactgcctgtgactttgacctccgcagcctgcagcctgacaagcggctagaaaacctcctgcagcaagtgagtgccgaggactttgagaagcagaacgaggaggcccggaggaccaataggcaggccgagctctttgccctttacccatcagtggacgaggtgggtgccactgtttccatactggagaatctcagtgaagactctgagagtcatgtggacaattgtgttgttcattattactatatagcagcccatggtgtcagggctcacttgtatgatttctggggcctcgtttttcactcaggcaagcctgtgtgtcatagcagagccattattgattatcacacagatgggattctgataataataacaactggaattttcatagcactttacaaaatatgttcactaagagcatctcatttaatccccaaatgtttcaagggtctacatgtagtaatcacacccagcaagtcaaaccatcctattatttgaggggatgtgtggtcactaatccattgagacatacattacttaaactttgatgttctttagtgctttgttactttctttttaatggtctctatgagcaaccagagagacctgctttgaaaacatttcaggctaggataatcacagcccatgctcccaatgtatagaactttgggatcttgattgtttacttcttcatttattggagctgactgacaacaataggataatgtagactttgcctgtggtcactgcctgaggcactttggatgaaatgagaggtgacgattattcaagccttttgtctgtttgaactccttatactgtataggaggctctcagttttcccctctgcgtgaggttatctacacttctgggtcttgccagaacagattactgctatatctctgctgtccaaatggtattgaaagttcagttggaagaaacaggatttgaggaaactgcataaaagatattctatccatccatgcctctaaatatttgaaattcgatccttggattaagtgagacaatcagagagcctgatacccccacccttctggattgtgtttgctaacctgcccttcagtgagctcacgactggtcagcaaggaggacaataaaggaaacagcagtcatgagataggatatcacgtccacatggaaatactattgttgacattgacctactcaccatctagcaccttcctctttgatgatctaaagggcaattagccttcacatcttccgagaaagaagaagcacgcttctgctgagataatacaaacacttagagattgtgctcattttgtaactaactctcttaagttctttacttagagcaaacttctgtccaccttcaccaaatgtggcaacttaatgattggggtcctgaatttactccagctttcttttcttttcttatcctgattttctaagcaccttggtttcctcatctatttttattttatttgcagtttttgtcagcagcctcaaatggtcttctgaatgaggcagaatataaaaataaattatctcacttatatatagaatctaaaaaagtggatctcatagaaacagagtagaaaggtggttatagcaggggctgtggggagagggagaaggtgttggtcaaaggccacaaagtctcaggcgggaggaatacgttttagtgacctatcgcactgcacagtgaccagagttaataataatgtgttacatatttcaaaactgctttaaaaaaggatttttaatgttctcatcacacacacacaaaaggtaagttggtgaggtgatagatatgttaattagcttgatttaatctttctacaatgtatgcatagatcaaaacattacttgatttaatctttatacgatgtatacatagatcaaaacatgacactgtaccccatagatgttcacaattactacttgtcaattaaaaaataaattaataaagtatgaataatgtgagcaatatcatcatctcctttcctcagattaaaaagcaacaattaggctaaagagctttttcaagattcaacagataaattaaattacaaaatggggccctaacccgctaactacaaagttcgtgttcccttgtttatgtatctacatacatatgactacctggtatgttgggacacataactgaaatccaaatatgatatttttaaatatcatgtaactttttagtttccatccacgacattaagactttttaccagatttgtcaaaacatattaaatcagactgatttggcctttactttccttcctcttcctctcagttctgtgatggagatgccaacatgtaatagagggacccaaagtggatgccagaagagagagaacaattaaaggatgcagagaatatgtccagtgagacgtttgcttgtcagtgtctccctggtggtattagaggggagaatgttccatctgaacagattaaaataatgaaacgtagcctggttttagaggaactttgttttatgatctttgaaacaatgcagacgctccattgggactgaatgttataatctgggagcaggcctaatggggcctgcttttattgagtagagagaagtgcttcgtaattagtgttgcagttatttgtaaactggcgtgtctaaaatgcttgagggcctctataccagccctttaatattttgaagctgttgtcacagaaattgcatttgtatttataatttgtgctttctccaaagaaagttctatggaagaaaggtaaatttctgcctactctgacatgattacaaatgctggttttttcgatgacacaatcagatttttaaatatatcattacttgatttccctgtaaggaaagttagaagagaggtaaactagtatatccaagttatggctgagtctacaggagaagcaaaagttggacttaaccaccaagcttctataaggcaagttctttccctaattcattctgagtctacaaaaggcggttattctacaaaaggcattctatgtcaatccctaagaaagattccactgatactccaaattatagaaaagtttgctgaggctgttggttacaagtgacagaacccaactaaaaccaattcagaaaaaaaggctaggggagtacttcttggctcacctaagaaaatcacaggtaggcaaatgtggagttgacctctggatccattgggagagtaaatgaaagaatatcatctctctcatactgtctctttctctctcattatctctttcattccgttcatttatatatatttttaggatgatgaaaacaagaggtatccattaatgtttcacatttccactttctgtttgcttgggaattagttgccatttcagttagctataaagcctgaggaaattcatatagcttagaagagactgaggaaatatatcacccaaatgtcatatgtggaccttgtttggatcttgatttaacaaaataacagtaaaaacaaattgagacagtcagggaaatttgaaactgacaaaaattatttagtggcaataagaaattattaatttttaggcataatggtattgctgtatgtttttaaaagtctttatcttttaaagatatgtactgaaatatttatatatgtatatggtctctgggaagttgcttctatgtaatccagtattgagcgagaaaggtggtaagtgggtaaatagatgaaaccagaatgcccctgaattgaacttgttgaagctagatgatgggtgaatggttcttcattgcattgctctctcaacttttgtgtatgtttaaaattttcccaatgaaaatcttttttaaaaggatttcaaaaattagaatctagaccaaaggcagtcccagaaatccatgagtgtctctaccttcaggttgttttccagttagggagatcttccctttagatatgtctgttccaatgatcctaaaaggtccagattgccctgagcgagtaggcatcaaaacaatgtctcctctgaaataaactcagccattccacccagcaacatggccaaccgccgtaaccacaaggaatggggaccacagggagaggttggagtaatgatgagcttaccacattgatcattccatcaaagtgggtacatatttaccaggaaggtgactttactgctatttgcaagaatgttaagcttgctgtggggtattcactggaaagctcccaggaaaagacagtgagatgtgaccctgttctttggacccttgcgatgggcagagcactcaccagtgtttggaaagcatactgcaagagtgggaattactgttttcaaggatttgcactacttatttttgcatacatgaatataattaacatagaatgatagttcagatacagatgttaaggttacaataggggcttgatatttctctttaagtgtttagtttctgtgcggtaaaataaacaggtagagctcttaatttgtcattactaaatttcatatacctagcactttaggaagctctaactgcataagcctgtctagaacttgtcaattcaaccccaagtctctatcatctgtttaagaaaacagtgaactgagaaagtgactctgtattataggatcaatggtttacagccttaagtgaaccattctgactcagatttcaaatctgaaactcacatacttactagtaaagcccttgacaggagaaatattgcaaatgtgtaattagagtgggcaaaaaacacacaaaaacatcaacaataggtataagattttgcaatgccatctggtggatgttactaagccatatccatgttcacatttccttccttcctgcttcagtctctttgtcttgaatgcttgggtttctaaaaggagaaactgttttgctgcaaatgctggctttgaggttgggggttggaagagaaactttcttataaaaggcagagtgttagaaaaaaagcaaatctaagttaacttgagccgtggagggtagccttcccttccctgggttaactctaattggagctccccacagaattcactaatgatttccttacgatgtgattaaaaataggaggatgctgtggaaatacgtccagtaccagaatgtcccaaggaacacctgggcaacagaatattggtcaagttgctgaccttgaagtaagtatcaacaaacacactgccaccgctttgagatttatcttgccttttacatacaaatgttgtgtttattatcagagcttgaatcaaagcggagctcccaaaatacgtctaacagtgggcagctgtggagtagtagaaagggcacgtttgagtccattcctggattttttttctaccaacttcttgatggtcattcttctacaatagagaaggcaaacacacgtgtctactaaagttaggcaggtaaggtcattgagtgaaatgacctacattaagaaaaatagcgcttaagtcagtggtgtgctggagtcgactgtactaactcgtgagatctgacagtgcatatctcttcctgggttcggtgaagtcacattggtaactttaaattggccatggcgaaagtatttacaatgtagaaatcagccaatgctacacgtttgcaccaccctcagcacccggagattatttgtaaaacatttaccagtatgccactgttgaaacacaatgataaatgcaactgaaactcagtgccaggggacaatagggagtggtgaggactgtagtaaactatgttaagggggcactcactgctagcaacagactcttgccatccaaataaacaggcccatttttgtcaactgtcttttctattttttcaagagaagctgaaaacccagatttttctgcataatataccgactccctaaatatgttctcattccctttataaacaccatataattaaaacacgactacagtctggtttcatcttgtgggccaattatttgccacatctacttcaaagtagttgcatccaaacgtttcaattgtatactatgatagcaaaaaaaaaaaatcctctatagacatgtattaattttgtactttcatattaaaatattatctacattataaaacataatagaaattttaaagatgaactagataaatctatataaattctagtattttcttcttccactgcaatagattgtcttgtgtaccctcggagtgcctccatacctctcttcgtctctgcagactgctattttcaagaattagttctccttcaaatccacagatgaaaactttaaagttgtacatattttacctaagcaaaactacagaagcgtaacatttatttatatactattagatgggtcatccatctctcaaagtcacttcataggtcccttcagcggcccctggtttgcagtgagaaggcatctggattctggatgtaaggctgggtttcaacccctgggaacttccctgggattttgagttcttccctataaatgaagttgatagaccttatggtctcaaaattcctacctaccacaaacttctatgattctaacgcatagcctctgccaacttcttctgcctcagaaaacaagccagcaagtctgctcacacagctatgggtggtctcttgatattatagtctcctcccgctggccagttctaccagagggtcttcagggccttttgtacggagaaatgagcagcccataaaccagctgagtgtcaagtaatgggcacagaaaagcaagctcttgcccttgcaaaccaacctggcagtgggagcttcctcatctgtctggttggcgggaggactgagtggaagtggctcttcccctctgcattgtttaggaagccttcgctattgtctgagggacacacctgccccgacaggatgcatcatcaggctacttttagatgcagcgactatgtcatttgagatggcagaaattctcctctatggtgctcatagccaagctttctagacctctccagtgaatgagaggcagctgttctcacaggtgggaaaacatggtcactaagagagatatgtgttattttaaaaaaatgttaatggaggccaagtgtggtgactcacacctgtaatcccaacactttgggaggccaaagtgggaggatcgcttgaggccaggagtttgaggccggcctgggcaatatagtgagaccccctctctaccaaaaactaacagatgtgttaatttttagccctagctacattgggaggctgaggtggaaggatcgcttgaggccaggagttcaaggctgcagtgagctatgatcatgccactgtattccagcctgagtgacagagtgagaccctgtctctaaaattaaaaaaagaggagtcacttgaatatctcttaatgaaaattgtaaagtgcagtttctagtgatgtccccgcaactgccaaagcagaaattaagtcgaattgacatatttgccaggtgcacttggcctgctcatgtgttttaaatagtatctatactaacctataactgcaagagaagagatagaccaaaaagacagccctccgagtaactacttagagtaaactagatgaaagaaagaaacaaattcttataggtaagcctagaatgtgacagtatgaatagtaaaaatataagggtaatattaatggcaaatgttttcccatttacattgatatgtaggattctattcataatactacatgttttagcccctgaggaatttgtttaaagttgtagacatctgtaactgtctctgtattgcttttcagaaatatagaaaccctcaaagatacagagagaattagggtcctgccaattctgcaaatgtttgtaacagaaaaaaaaaaaaagaatgacaacaaagtatttttctgttttgtgttttaaatggagaaatattttaagatttaataccatcttatgaaaagtaatctcagctcttaggagtcttcttgatggtgaaactttaatgtgcagaaaatttgcccaggcagtttcttttaaatgcagattttggaggaccttccataacaatctccctcaagagattctggttgagtaggtctcaggtgggatcaagaaacctgcatgctggctaacttcttttgcttcaaaatgctagattctggggactacacttaaagaacaaacactcacggaaaaagcccaggttctgtgatcagagatggctgggctcaaaacctgaccgaacactcacggaaaaagcccaggttctgtgatcagagatggctgggctcaaaacctgaccgaacactcacggaaaaagcccaggttctgtgatcagagatggctgggctcaaaaccggaccgaacactcacggaaaaagcccaggttctgtgatcagagatggctgggctcaaaacctgaccgaacactcacggaaaaagcccaggttctgtgatcagagatggctgggctcaaaacctgaccgaacactcacggaaaaagcccaggttctgtgatcagagatggctgggctcaaaacctgaccgaacactcacggaaaaagcccaggttctgtgaccagagatggctgggctcaaaacctgaccgaacactcacggaaaaagcccaggttctgtgatcagagatggctgggctcaaaacctgaccgaacactcacggaaaaagcccaggttctgtgatcagagatggctgggctcaaaacctgaccgaacactcacggaaaaagcccaggttctgtgaccagagatggctgggctcaaaacctgaccgaacactcacggaaaaagcccaggttctgtgaccagagatggctgggctcaaaacctgaccgaacactcacggaaaaagcccaggttctgtgaccagagatggctgggctcaaaacctgaccgaacactcacggaaaaagcccaggttctgtgatcagagatggctgggctcaaaacctgaccgaacactcacggaaaaagcccaggttctgtgaccagagatggctgggctcaaaacctgaccgaacactcacggaaaaagcccaggttctgtgaccagagatggctgggctcaaaacctgaccgaacactcacggaaaaagcccaggttctgtgaccagagatggctgggctcaaaacctgaccgaacactcacggaaaaagcccaggttctgtgatcagagatggctgggctcaaaacctgaccgaacactcacggaaaaagcccaggttctgtgatcagagatggctgggctcaaaacctgaccgaacactcacggaaaaagcccaggttctgtgatcagagatggctgggctcaaaacctgaccgaacactcacggaaaaagcccaggttctgtgatcagagatggctgggctcaaaacctgaccgaacactcacggaaaaagcccaggttctgtgatcagagatggctgggctcaaaacctgaccgaacactcacggaaaaagcccaggttctgtgaccagagatggctgggctcaaaacctgaccgaacactcacggaaaaagcccaggttctgtgaccagagatggctgggctcaaaacctgaccgaacactcacggaaaaagcccaggttctgtgatcagagatggctgggctcaaaacctgaccgaacactcacggaaaaagcccaggttctgtgatcagagatggctgggctcaaaacctgaccgaacactcacggaaaaagcccaggttctgtgatcagagatggctgggctcaaaacctgaccgaacactcacggaaaaagcccaggttctgtgatcagagatggctgggctcaaaacctgaccgaacactcacggaaaaagcccaggttctgtgaccagagatggctgggctcaaaacctgaccgaacactcacggaaaaagcccaggttctgtgatcagagatggctgggctcaaaacctgaccgaacactcacggaaaaagcccaggttctgtgatcagagatggctgggctcaaaacctgaccgaacactcacggaaaaagcccaggttctgtgatcagagatggctgggctcaaaacctgaccgaacactcacggaaaaagcccaggttctgtgatcagagatggctgggctcaaaacctgaccgaacactcacggaaaaagcccaggttctgtgatcagagatggctgggctcaaaacctgaccgaacactcacggaaaaagcccaggttctgtgaccagagatggctgggctcaaaacctgaccgaacactcacggaaaaagcccaggttctgtgaccagagatggctgggctcaaaacctgaccgaacactcacggaaaaagcccaggttctgtgaccagagatggctgggctcaaaacctgaccgaacactcacggaaaaagcccaggttctgtgatcagagatggctgggctcaaaacctgaccgaacactcacggaaaaagcccaggttctgtgatcagagatggctgggctcaaaacctgaccgaacactcacggaaaaagcccaggttctgtgatcagagatggctgggctcaaaacctgaccgtgccagtccctaactgtgtagactttggcaagttccttattccctgggaaccttgctttcctggtgtgttaaatgcagataatatctgcattacgctgtagttgtgtaaagagactgatgtgtggaaagcacttattataacacaattttaagtctttaataaatgtcaattctctttttctttctcggaaccacagaggacttactactcagtaccaacctaagtatatcacagcaatattcaggccctttgtgtagtagggagtaaacaattaaatatagattgagcatgccaggcagcagctggtgagcctaggcccaggaaagcctccaattggcctggtgcagtggctcacacctgtaatcccagtactttgggaggctgaggcaggtgagtcacctgagctcaggagtttgagaccagcctggacaacatggtaagaccccatctctactaaatatacaaaaattagctgggtgtggtggcacatgcctgtagtcacagctgctagggaggctgaggccgaagaatcgcttgaacctgggtggcggaggttgcagtgagccgaggttgcaccattgcactccaccctgggtgacaagagcaaaactccatctcaaaaaaaaaaaaaaagaaagcccccaattaatgtgcaattacctaataatagaaagaataatcatagaaatcctcaacactgggcttttcggtggtaaaatgtatgtaacataaaatctaccatctttttttttttttttttttttttgagacagagtctcactctattgtccaggctggagtgcagtggcatgatctcggctcactgcaacttctgcctcccaggttcaagtgattctcctgcctcagcctcccgagtagctgggattacaggcacttgccaccacgctcggccagtttttgtggtttagtagagacagggtttcaccgtgttggccaggctggtcttgaactcctgacctcatgatccgcttgcctcggcctcccaaagtgctgggattacaggcatgagccactgcgcctggccaaaatctaccatcttaaccatttttaaggtacagttcagtggtgagtacattcacattgttctgcaaccatcaccaccatccatctccaggaatttttctcttcccaaactgaaactctgtacccgttaaacaataactccttattctccctactccccagcccctggcaactcccattctactttctgcctctatgaattttactactctaggtgcctcatgtaaggggaatcatgaagtaactgtctttttgtgactggcttcttttactcataatgtcctcaggttcatctatattgtagtatgtatcagaatctccctccttttatggctaaataatattccattgtatatatgtagcatattttgttatggcctcatatatgtatctgttcatggacaagtgggttacttccaccttttggctattgtgaatagtgctgctacttggcattgtttttaagatacattcacacacatcattatacgtgatcctcacaacaaccaggaaaatggaaaggcaagcatccttaccttattttgcagataaataaatggaattcagaaaggcgagtaacctgattagggtcgcagaattagcagatggtggaggaggaacagagtccaggtctctgcctgggtgccctgggagtctgccatgattccaaattgcctcatttccaaaggcgccatttgagcaaataaccctttttgtctgtgctcatattctgtccaaatattcttctaaaaagtcctcttttgagacaaagctatccattgatgaggacatcctctcacacatacctggagacaaaacatgactttattgacatgatgtctgaggtaatggtggactggggcccttttcctggtgctctctgcaggtaacatccaaagccatgggacatcaagctgagaaacttggaagaccttcaccagtgttccatgtgcacctgtaatgtccaccaagatactaaaggcaaataatgcaccaggattatgctttgggattcaccgtttcgaggggaattggcaattagggccaatatgagggctcatctttctagctctcatggggcccaggcacctcagtgtttatctgctgtgctcaagcccctccctgacctcaactcagcaactccccagtaatggagttaggaagggccagacattcatccccatcaaaacccagccttcttctgactgtcccactacaaatctaaggaaaagcaattgaacttttcttttgttgccatctgaaaagccccattccttagaattgaataatacagattctatcctttaaatttttttatttcaatggctttagggtaagtggtttttggttacatggatgaattgtatagtagtaaagtttgagattttagtgcacccgtcacccaagcagtgtacattgtacccagtatgtagtttttttatccctcatccccctctactctcctgcttctgagtctccaaggtccattataccactctgtttgcctttgtgtactcatagcttagctcccactaacatacagcatttggtttccattcctgagttacttcactcagaataacaacccccggctccatccaagttcctgcaaaagacattaattatttccttctattttatggataagcagtattccatagtgtatagataccacattttctttatctactcattggttggtgggcaattaggttggttgttggttccatatctttgcagttgtgaaacagatactatctagcaataaaatgtgaaatgtgaacaagtccattacctcagacagaaagtctaccctctgaaaacacagtagttacaataagaaggtgaatcacactaaaggtccattcagcccactctctcttgcagtgagtgagtgaatgagtgagatattccaaaaatatccaccatgcttttgtaatgtccaccatgatctcaaatgattaggaatttttcacaaacctcctatatttctctattaatatcccagtgcgattctcatatacttggagttttccaaatatttcgggaaactgctcatatttttaaccagtttatctatctaggtgttttcagaaaattcaaaattatctaactcaaagccacatagattttcctctctttctatggtaggttcgagattgaaattgagcccctgtttgccagcattgccctctacgatgttaaagaaaggaaaaaggtaagaaagcaaagaaaaatccatccctaaggcacatatattgttcatgattctttgcatgtatgtttttaaatttctttgcagcaagaacctatcagatttgaaagcaaatgatctttgatgagtccagttctgttgcctttgcaatttttcaagcagtggtctgagaatgtaatttatgatctttgaagaattttagagggagaggctactggaggtgctggcctggttggaatagagaaagaatgaaatagcgcatggggttatgtataaaacaaacccatttaaatacatttttaacaagcttggatgcgcatgtaaagcttcctcagtttgagagttctttgcactgtgaaataggctcatgactgaagggcatcttacatggtagaggtctcaatttgtcacagagttcagaccttaccaactgtaatgtgcttttaatgaaaacagtgaccaagacctctcgtgtgtttttaatgtttagtcattttgtgactcctagaagaggacagcaatagcaaatccagagtaggatggacacttctgcccttctttacccataatcattctgtatttaaggaaacaagcatctcctgcataaatattaataatcactgagatttgtaggataggttaactgctaaaacaagcagaacccaatctcagtggtttaaagcagtagttctcaaacttgagcatgcatcacaatctcctggaggacttgttaaaacacagattgctggacctcacccacagagtttctgattcagcaagtccaggtggggcctgagaatttgcatttctaacagtcccctgctgatgctgaagctactggtcaggggaccacattttgaaaaccgctggcctataagcaagaagttgctgtctttgtttctttaaccatccagggtgggaggagggacccctctgttccacgcagccactcagaaatacaggctggcagtggctcctccatcttcagtatgttctctccccaaattactcttgtcactgccattgctgcccctgaagaagagaaaagaaggatggaggaggcctggaagtttgatacattgcttctgctaacaattcactggagagaattgagtcacatgatcacccctcattgcaaaggaggctggtaaatgtagtctctgcctgggcagccactcaccactaaaattctcatggtgatgaaggagagaacccaaccatacagtggctcttaagtaatacgacactaagagagccaggagcactgttcacatcatgctcttgctcagaatcttcactaagattcattccctacaaccaggctttcttcatgatggcattcctctaccttctttccatccatagtctatgcagagtcaagctagaccgctgactaagcttcccccagccgttcaagcctctgagatatttattcatactctaatctctccctggcacatcatcaccttccacccctgcctatcagaatcttctaaggcccatccatctccagtgctgcttccatgaaaagttgtccttgtcacccaactgcaaatggcctgtcactctggaacttccacagtgcttctttgtatgcatgtggtgacttgtattttgcttttactgtagttagttacatgtttaccttttccctcacctttttttttttttttttttgagtcagggtctcactctgttgcccaggctggcatgcagtggggcgatcttggcttactgcaccctctgcctcccgggttcaagtgatccatcctcccacctcagcgtcccaagtcgctggaaccacaggcacatgccaccatgctggctagtttttgtattttttgtagaggcagggtttcaccatgttgcccaggctggtttcaaactcgtgagctcaagcaatgtgcccgccttggcctcccaaagtgctgggattacgagtgtgaaccaccacacccagtccttccctcattcttgattgtgaattaattgagagcagaggtcctcctcttctgtagtgaagtaactgatactcaggaaataccggtgggttaataaacatttaaatgtttcaaggaacatctctcaaatggctccagaatacctagacattgtgacaaaacatttgtcagatttatccaggagccactttcctaaaccacatctgtgattattacacttactccttcagcaaaatttctctgtggtgtttttactcctttttaacatgtttaaaccatgaatgcaacaggtctaacttatatttcactttgctgctcatttacagatctcagaaaattttcactgtgacctgaactctgaccagttcaaaggatttctgcgagctcacacgccttcagtggccgcatcaagtcaggcgagatctgcagtcttctcagtcacctacccgtcctcagacatctacctggtagtcaaggtaattcagtacgatctgatttgcccaatctgatgttttcattgctgtgttgttcccagcacatgtttggggtgcacgcaatctcagaatgtgtccacatatcctctgagattcactttgtttccttctcagtttaccccttttccgttctaagtaaactgtttcagatactagaaagactaggttttggagacacacagacctaggtttgagtcctggctttacaacctagtaattaaatggcattggcagtttcctggtctttctgagactgagtttcctcatctgtgaagtggagataatcacactgacctcagtggatagtcatgactacagaataaagcttggcacatcttgggcacccttctcctaattaaggagagttccctcagtgacctggtgcaaagaagctgctgtggagaaaggaacaaaatctctgggctagagtttcctaacgatgttcatgttgctctagagatgcatagttacgtgttcccaagtccagcctcttacaagctgaagcgtgggctgtggttttcaagtttcatcctccttttttttttttcttcttaccatgtcacagactgtctctaatgagagttgaaatctatggggcaattgtaagtagaagagcctttcattctaggctatactctttgctgttgtaagaaaaccagatcctttctctgtacaccaaaatgactggttagaaattaacaaacatcaggtattttacctaccttaggccagataattggtcttattgattcttttttttttttttttttttttttttgagaggagttttgctcttgtcacccaggctggagtgcagtgtcaccatgtcggctcactgcaacctccacctcccgggttcaaacgattctcctgcctcagcctcccgagtagctgggattataggagcccaccaccccaaaccaggctaatttttgtatttttagtagggacaggatttcaccatgttggccaggctgatctcaaactcctgatctcaggtgattcacctgtatttggttcccaaagtgttgggattacaggcgtgagccactgtgcccggccgtaaaatcattgtaaaaacaaaacaacaaattcaggtgtctgatttcatgtgcccccagcctcttaggtttggaacattatctagttagtacagtgttttatgtctgtagtctcagtgatcgccccatgatctcatggattccaaataattcaggtagctttgaggtcacttaacagatggcaaatgtcttttcactctagcttctttaacaccatataacaaagattatgagaggttactgtagcttgaggggaacttatttaagcttatagaagtatagttaaaattatattgctgaaaagacacttctattgttgtcaaacttcaatgtgtctccttttcgttgcaatattacttagacatacaggaaaattaaagcccactatgatagccctgtaggtaagttcacaattctctgtcagcctaggaaactgaagaagccaacactagttctatagagccaaattttatctcaaactctacttcccagtggatgactttctcttgattaatccgtcatattctgccaagtaacagtggttacccattggttcctatcacttactaaatatgttccaaaattttcaaatgtataaatgtgttcatttggcataacaaacatactaaagtgtttggataggtttaagaaattgaaatctactcagcaagacagcccctggttggctttctgtttgcttttctttatcgtaatgccatcattgttgcttctttccctttaaatatatagtaaatggtgttaaactatttagcacatccaggcagacattatttggtaagaggggcttctttcttttttgtttatattcccaggccgaacatcagggtctttactgtattttaggtagcatcatctagttcaggtgttgcatataatacggctttaagggattatttccgcttaaaagtttaattcaagattttgtgaaatttttttttaaaaagaatttgttttacaatcaaggaaagaagagtgaaaatgggattgaattggaaacttttcaaaaattgtttaaaaattggtatgccgtgcccaatttaaatatttcataagttgcgatgggcctatccttatgtaagggccacatagtttgagaaaacacaaagcagagagcctagcactttagaagtcttgcagatgttaaatttcccatcttaaagagtttacaatccagttaaaaaaacaacttggcattcaaagaaatgggttcaaattcctattttgctacatttgctgtgtatggtagcaagtttagtctgtcagtctaattggacaatgatccctgtgcctgagtggttttgaagaaaattgaaataatgtatgtaaaaacacctaccctgtacctgacataccataattaggtaaacaataaatggccatgaaatatgaaaaaaataggtatgccaagtgttaatcctaccccttctgaatagagcagaaagtagtctgttcccttaagaaaagttttaggttaatctgataggcttatttgccctactttccatggttatgaggagtcatgcatttcattacacacttttgcataaatcatgagggaacaaacaataggttctcatgtcggtctgcagctccttctcatgaagtacctggagttctccttgcccactgcagccagggcatagtatctgctggtctggtcaaatctgacttctcctgcttcctgtatgttccatgatacacactactagtgcatgaagccgtggcattccccttccttgcttcagggtcctaattaagaagttcttcatctctgttcagaatttattctaaagaccacatttttaatccattcacttcatggaaaaattagcttccttccaatttgttctacaagctcctgactatgagcttcaggagaatgggggcagtgtttatcgccaccttatctcccagctgctaccatatagaaggtactcaacaataagtaaacgattgctgattagcaggaatactggtcagtttctagctcaagtgttacgtgcttatgttttcagtgtggtgcatctctcagtgggattcgccttctcttcatgctgtggcaatgggagggggttttgaacttctttgatgagaagagagacttcctgcttggagtcctccctgaagcagatattcattgagtagcctcatgctgcttcctttgaaaccccataaatgcccctttatcatgggtattgttaaatactttgtgcctaactcacagcacctattaagtatgtgtcccttttgtactgtgttgacccaaattctttcttcaaggatcatctcaactgatgggactaaatccactggttttactcttcaacatctaagttaaattttttttgagcagagagttaggaaatttcaaatttctccttgtctttcttttaaatatggtgcccaaatttatgacaactggccagccagtcactttacctgaagcaagacagaagacacttcattcattcttattaccagcattcattcctatcaacagccagttagcaaagcaagaagctgcacatcccaatgcttttgagtttctttccaagtctgttaaatccagagaattagccctgataggaattacaagggagacaattacagataatttattcggttcagtcattcattttgtggaaggttttagtccctaacccaactttcacagagaccatatctcttttttacattgtaagcaataataaagaaaatgagttttccacttcctacgtatgtctcctgggttttgttttataaaataacttttattgctgtttttattatatacataatacatgtttattgtttaaaatagaaaatacacataagcaatgggaagaaaataaaaatcacacataatcccaccatagaaagttaactactattaacacttgctgcatttgctgagtatctactgtcacccttttaatatgcctttatgatttgttaaataaaattgtatgctattctttatataaattttttaataaaaaaatatgtatcacagatagcttcctatgtcatcaaatattgtcataaaatgtaattttgatggttgcatagattcctttttatggatgtaatttatgtgccttattttaatattctttttattggtagattgaaaaagtcctgcagcagggagagattggagactgtgcagagccctacacggttatcaaagaaagtgatggtggaaaggtatggtaatttgagtgttgttaaatggagacatcttagaagaagcaggtattttcagaagtgttacacaaatagttaatgggctttagtccctaatgtgtccctatataagacactactacattttaattaaataaaagaggaaaagaaaactggtcaccgatgatgactttttttttttttttttttttttttttgaggcagtgtcttactttatctcccaggctggagtgctggagtgcaatcacggccccctacaaccttgaactcctgggcttgaatgatcctcccccttcagcctcttgagcagctggtactacaggcacatgccaccatgcttggctagttttttatttttttttagagatggggtctcactgtgttgcccaggctgctctcataattctggcctcaagtgattctcctgcctcagcctcccaaagtgttgggattacaggcatgagtcaccatgcccagcctgatgatgattttttagagaaataaatccttgaattttctaatgttgacatacagcaaggtctgactgcataacttgattggggcaaggccaccccctgttgtcttcattctgaggctctgactcagctggttgggaggtccgtggagaccccaaaactaaacagtgccagagctctcctggccttcctcaacagcatgggccgctgccctttcaggtatgcaaataactgggaattggctgccactaccatgcattatatatattcattagcacagcataggtgttgagcctatgaaaaggatatcttttctcaacagcaatttgcaaagattcccagtgtgatttttaaaacatggccttggccgggcgtggtggctcacacctgtaatcccagcactttgggaggccaaggcgggcagatcatgaggtcagaagattgagaccatcctggccaacacggtgaaaccccgtctctgctaaaaatacaaaaaattagccgggcatggtggcacgtgcctgtattcccagcttctcaggaggctgaggcaggagaatagcttgaacctgggaggcggaggttgcagtgagccgagatcgtgccactgcactccagcctgggtgacagagtgagactctgtctcaaaaaaaaaaaaaaatagcctttctggaataagacttaccttattagtattgtactctacagactcataaatgtcaagtaagatttattgaactcaaggcattttttttttaaaatctgtcttttattctgaactcagaaagaacaccttggaagtattgtaaacttcctaaggagttgttaggaagctttttagaattttttggagttttccaaggtgacttttggagaaacaggttcacttgggagcttggtagatgatatactaaacttgatttcaagattcttttatgcaaatccaagtcacatagctagccaccaaaagaattgataatctgatgtaatgagtctctttttgttttcgttagctaaaaatgtattttactaattaaatgtagcctttttgtaaactcctcgttttttaatctttatttccttatcagctagacccaagtgcatcatttttctgcctattcactgtttttattttttagtgggaagatatgtttttactctttttaatcagtagggtttggattttggagatggctgtcatattcaggtcagaggcagttgacttggtgctgatgcttgtttcagcttgtttctttccattttcctccagagtaaagaaaagattgaaaaactaaaactccaagctgaatccttctgccagcgtttggggaaataccggatgccctttgcctgggcacccataagcttatcaagcttcttcaatgtctccacccttgagagggaggtaactgatgtggactctgtggttggtaagattttcacctgcagtgggaaagggagggctccccagtgtgcgctgcccaggtccacagcttactagcggggactgggggcacagtgaggtgtgggaagtggggaggcagaaggagataaatagaatgaaacactgttatgactggattacgtagatttggacggtgatctccaaaagaaattatcacgaacattggtgaagattaagtatactcttatagtaagattttctagatggtatgacactttaaaaagctgatttttgctagccacccgctctcaaaagtaaaactttaacaagaaaatgtagtaaccatctgtagtgtgttaagcagagacaccatggtcgactcctaaacctaaaaaaaaaagcctctgttacaaaggcttcaaaaagcaaaactcaacaggaacagggcgtggtggctcacgcttgtaatcccaccactttgggaggccgaggtaggcggatcgcttgaagccaggagttcgagaccagcctggccaacatggtaaaaccctgtctctactaaaaatacaaaaaatttgctgggtgtggtggtacacgtctgtaatctcagctactcgggaggcagaggcaggagaatcgcttgaaccagggaggcgaggttacagtgagccgagatcaggcctctgcactccagcctgggcaacagagcatgactttgtctcaaaaaaaaagaaaaaagagaaaaactcaagtttcccagcaaaatttccagttcgttaaagtttactttgccaagtgcaatgaaaaaatgggcatccaaagaatatttactgttttagtttatttagcatatttctttttcgtcatctcacccgtgatctgaatcattcattcctacactgcttggtgtagaaattttcaaaagggttgcaaattttcaagtagacctgcccatatcacctgtggtggggtttctctttccctaaatgcttttgtatccaccaaatatagaagtccatgttcacatcttttcatgcattccttaagctaaggcttaagccacttctgaaatactaccttgagcagggaagtggaggaaagggcattttgtgattgctgctgctattttggagttactggtacataatcaccagtcagaactcctgggttatttctggttcgtcaataacaaacctcactttaccacatcctgatcttcctgccacagctttctttaatgccgtctatgtagacccaagtaacttattgataagagttatgtatagagcttagagggcacacaagctaggtaattcaggatagggcatgctgaggcctcaatcatctctaggtcaaggataacctgacaacagagactgattcttaaggagcaaccagaagatgcaaagatgtcatgtattatactgaggcagaatggcaagtttaggtgggtagaggtagcaagaaattctaattcaacatcatggtaagaattaaggataagaagatactcaaagacgggttggaactgctctagttctaagcaatttgattatttacaagagaacccatgagtttttgcaatataaaagcaacaagatctccacccaaatcccaaaaggggataagaaacaactgggcaaactatcagggtcccagcccaagtctgagtgtgatttggggttctaattcccattgggcagatcacccaaggcagaaactcagtcttgctgcctggtccacataatgagagcagaggaatgctgggattcagagtgtacacaggctgaccccagcatgtttgggtcacaatcacaaatgccttcaggggcatttgagtacatgcctctcccagtggaatgcaaatatagaaataaaagaaaagcaaacactgtgctgactaaataaagcttatcaggagaccctgttctggctatagctctggactcttgccgggtggcatttgggctaccctaatttccatgtgggaggggcccatggctgctcctggcctctctcctctggtcggaggaggattaaggacaccaacaggaggactaagaaaggtaggggccaatggaaggacattttcattcaaaacaaggatggccatattcagtgttcctgatcagtgactttaatcatacatattgtgaagttaataactgctgtgtgtttgaacagaaaggcatactttggagtgacaattgtttttcttaaagggagaagctcagtgggtgaacggaggacattggcccaatctagaaggctttctgaaagagccctctccttggaggaaaatggggttggatccaacttcaaaacctccactctgagcgttagcagctttttcaagcaggtatctcttcacattacagtgtgtctggatttttccccatactggcatgggcactggaacccacaggaggaggatacgtagtgattaagagagcaaattagttaagctcactctcttagttcattttctgctgcttataatagagtatctgaaactgggtaatttaaaaagaaaagggatttgtttctttcagttttgaaggctgaaaaatccaaagttgagggcccacccttggtgagggctttcttgctggcggggcctctctgtagagtcctgaggtggagcacggtgagcagctgagcatgctagctcaggtctctcttcctgttcttataaagccaccagttcccctcccatgatgcagattaatccattaatctgtgaatggattaatccagtcatgagggcagagtcctcatgattcaatcacgtcttaaaggctccacttcccaacactgccaccatggggaccaagcttcaccatgagttttgaaggggacattcaaaccacagcattcacaaagcctcaatttcattagccagaaaacgggaacaatagtacttaacttcatgtggctagcaggaaggtcaggtgacatgagacctgtcaagctcttcttagagtgcctggaatacagtaagtgctcaatgaatgttagctattttaactgagagaagggttaggttttgttccttgtgataccaactatcctatttgaactatcttggccaatccattcattatgctatgacaacagtctggctgggccatctccttcccggtggatctcagggtttcttggcctggctattcatgtgcaagtttccactttcactactgcttgatgtgcaagtttccagggctccctgcttgctcagagagggtgaccattccagatggtactctttgttagctcagtaaacatcaagactatttaaaaaaataaaaaacttcctagacttgtcaacggtatagagacagaaagtagaatgacggttgccagggtctagggatagaggggtggggagtcactggttaaagggtacagagtttcagattttttttgcaagacaaaagcattctggaggttggttgcacaacaaagagaatgtgcttaacactactgaattgtgcacttagaaacaggtaagatgggccgggcgcagtggctcatgcctgtaatcccagcactgggaggccgaggcaggtggattatgtgaggtcaggagttcaagaccagcctggccaacatggtgaacccccgtctctactaaaaatacaaaagttagccgggtgtggtggtgcacacctgtaatcccagctacttgggaggctgaggctggagaattgtttgaacctgggaggtggaggttgcagtgagccgagattgccccactgcactccagcctgggtgacagagtgaggctccatctcagaaaagaaaaaaaaaaagaggtaatatggtaattttatgttagttatattttgccacacttaaaataaactcgcttggtctgactctgttttggaaagttttccatagctacgcagtcttcgtggagcatttaaaggggttacattaacaaactgaaatgcaaaagggatgctgagggcgcctgtgcaccgtgccacatcatagaaatagtaaaggtctgaaaaggtttctattcagcatacatgtacccttcccaatcttatgaccttggaggacaaggtacttaactaagtctggatggtctcactgggaataagacatatctacccacttaccttactgggttgttgtaaggattggagatcatgcatgtgtgctcctgacccatcttgggcatatgtgggggtggacagcatttatacttaaccttgttcgagacaaatgtgaagaaaatgagatggaaagatgctttctccaccttcgaacatttgaagaagaaagtaaacttattctgtattgttccggggggtaatactggcatcagagggtgagagttatcggggggaagcttttggcctggttttctaatggtcagacgggcttccttagaatgcagcagatgccccatccccagaaggactgataagaggccgaggcacagtgagtcacagtgattgagaaggatttaacaagaagtggagctcagtgatttcagagctgtctataatcctaatttctatgaaagacttgtgagaataaaacttaaaggtaaaaatcttcccagaaatcgtttgtccccaacccaagagtcaaaggtgcatctacattaactctgacttttctcttggcaggaaggagatcgccttagcgatgaagacttattcaagtttttagctgactacaaaagatcatcatccttacagagacgagtcaagtcaattccaggtgtgaatgacttatctttatcctctttagctgtgccaaaactgcttatcgttagacacagtctttgtctaatgccagaatttataaaatcatgtttgccaagtgaaatgtgagattttgtgttaggggttaagaatctgaattgttctatgtctttggcaaacctattaatgtttttttaattttcttaaaggattgatttagtaaacaaaccttgtgctttagatctggtttctcagataatgagataattgtttaaacagaggagcccctttaatcaaataaaatattatacttagtattaaaaaagtaaatgtgagatgctttggtagaaggcaaaggcatcttccttatcctcactcggcagccctggaggtacttctgtagcatcctcaggtccagggaagccagtttgtgtttgtttttgtttttttgagatggagtcttgctctgtcaccaggctggagtgcagtggcacaatctcagctcactgcaacctctgccttccaggttcaagtgattctcctgcctcaacctcccgagtagctgggactacaggtgcctgccaccacgcccagcttattttttgtatttttagtagagacagggtttcaccatgttggccaggattgtctcgatctcttgacctcgtgatccacctgcctcggcctcccagagtgctgagatgacaggcgtgagccaccacatccggctggaagccaattttaaaactcccaatttttactgctagcaatgcagggaagttacttaacaatgtaaaattatactgtggtaattcaggaaagaactttaaaaatcctctaatccattccttctcattttacaatttcttgctttatattttattttatagaggctaaatctcgaaagttatcatgacacacttttctcaagctgtaggaaattagctccaaaacttttttacagtactatagtttgttcttattttcatgaaagaaacacagtgcaacaatctttcttgattccctcataacatgacagtttctttactagaacattcctattttctctctttaggcttgctaagactggagatttctacagctccagagatcatcaattgctgtctgactcctgaaatgctgcccgtgaaaccctttcctgaaaaccggacacgcccgcacaaagagattttggaatttccaacacgagaagtatatgtccctcacactgtgtacaggtaagaaacacaggctcgggctgggcgtggtggcttacaccataatcccataactttgggaggccgaggcaggaggattgcttgagctcaggagtttgagaccagccttggcaacatggcaaaaccgtgtctctacaacatatacaaaatttagctgggcatggtggtgcatgcttgtaatcccagcaacttggcaggctgaggcaggagaatcgcttgaacccaggaggcagaggttgcagtgagccaagattgcactactgcactccagcctgggagacagaaccagactctgtctcaaaaaaaaaagaaaaaaagaaaagcaggttcttggaaaaccgttgagctcacattctgagttttatttgaataacgttttctcatccttcaacctgtcttcctacttcctaagtttcagggaaatgaaatgtgatatttatgtaaccgtaggtgattgccaaatctctttctaaacatagtttacctaattctctttaacaagaaagggttacttcagatgtaattgtagtttaggattatagtggacatatgttttccagagattaaaaaaaaaatctgctagccattacctttgttctcctctgtgcagagggacatattagaaaaagagcaatgtgaccaaaatgtgctagttgtcaaaaggacaggttttcagctaaagattagctctttccaacagaatttacagcaataacataataatagcacacattccaatagcatttacagcaataacagaaagttctgtatgtgtgccagcagtacaatagccactaatcacatgtagctgttcagcatttgaaatgtggccagtgcaatggaggaactgaaaaattgattttaattaattttaatttaaagtcaagtaactgtatgtgtctactatattggagagtatggagctagacactgaaggcctaacaggttgggctgccttggtttctgaatcgcttatggtggcacctgacctattccatggggtctggaaggagtgcttgtcaacacatatctgccaaaggcattaatgctcatgcacttctttattttgagactatttcctttaatgcagaaaaggatgccttctataaaaatcatctcttccccaccatccagaaatgacattgttgttttctgtgtttttatataaaagaaatacagtggtactgattcagttgaagtcttcttttatccccagtctccagtcacagacttttacctcacctcctagacttttatcatcatgaaattatgtatttcctattttttctccttttacacacacttacacacacatctgtgaacgctcaatggcattatcttcatattcatttaaaatgtacgcaaatgacttcacactctaggtcaggggtccccaacccccgggccatagaccattactggtccttggcctgttaggaaccaggctgcatggcaggaggtgagcatcgggtgagtgaagcttcatttacagccactccccattgctggcattaccacctgagctcctcctcctgtcagatcagcagtgacattagattctcatgggagcatgaatcctattgtgaactgcatatatgaggcatctaggttgtgcgctccttatgagaatctaatgcctgatattctgtcgctgtctgccatcactttcagatgggaccctctaattgcaggaaaacaagctcagggctcctactgattctatattattgtgagttatataattatttcattatatattgcaatgtaataataatagaaataaagtgcacgataaatggaatgtgcttgagtcatcccaaaaccatcccctgccccccgctgccaccccagtccatggaaaaattgtcttccatgaaaccagtccctggtgccaaaaaggttgaggattgctgctctaggtgttatattacactttgtttttgtcactcaaaagattgatttgtttttcttttttctttttttttttttttttgtttgagtattactatggagtcgtgagtcatttttctttctacttacccagatttccacaagttttaccaatgggaactttttaatggcttgcatttttggaaatatcagtattgattcatgtaaaggtttgtgggtttttttggggtttttttcgtttttttgtttttttttgagatggagtctcactctgtcacccaggctggagtgcagtgacatgatctcggttcactgcaacctccgcctcacaggttcaaacgattctcctgactcagctgcccgagtagctgggactacaggtgcctgccaccacacccagttaatttttgtatttttggtagagacagggtttcaccatcttggccaggctggtcttgaactcctgacctcgtgatccacctgcctcggcctcccaaagtgctgggattacaggtgtgagccaccatgcccatcctgttattccttttaactgctgtttagtattcctttgtgaagaggccatattttattcatttccttgttgatacgcatttaagtctttttcaagttttcagctcttacaaacactatgaagtaagattttttgtctttgcccctctgtacacgtttgtgaaagtttctttaatatatctaaaagtgaaattaccagatcacaagtaatacacatttcagtcttaagttttctaaaattttacatttgcagtcctaacagcagtgtgagagaattcccattttccagttcctcacccatactttccagtatgacgtatgtgggactaaaatgcaaagaacttcagagctcacctgatccaagcattcccacccccacatttccagatgcacaaaattaagacccggaaaggataagtgaatggttccttgaggtcaaaaattacagcgaggtggccagacacagtggctcacactgtaaccccgctgctttgggaggctggaggactgcttgagtctaggagtttaagatcagcccgggcaacatagtgagacccccatctctacaaaacattttaaaaattgcccaggtgtggtattgtgcatccctgtagttctagctacccagaaggctgaggcagaggattcttgagcccagaaattcgaggttagccttgtgccactgctctccaaatcaagcaacagagtgagaccctatctctaaaaaaaaaaaaataatttagaaaataaaattatactgagaaatacaaacagctattcacacaggaatggagagttcttctttacagtattcaggaggtatacacttatttccccatttaatccttcctggagcagctcttcattttcaatcctcattccttacatctaaacttagtccccacgtctccctcctagaggagataagcattctcaggatgcagtagtttcgattctctattccttagaggaagatgaaggcatgaaaatgtttgcttatggatgctttgtatctttttagaaactttatcctataatcgggaaacaatgcttgtggcattggaagagacttgcatccaatgaattctgtagttattcaacttcccctcagcatttaatcacccacaggtggcatttacaatgttctctactcgttcctgcaaacattatcccttaattacatcacagtgggacttagagtgcattagtgcactgaatgatccagaaatgtaggagggcaaaggaggacaagtctggacggattacaatggacccaacttgtcatcatgagaaacagacccacaaatacagagttaatcttcttgagctgtactggccactgtagaagtgccaaggacaccccgttagaaatgccaaggccaccctgttagaaaccaggtcttggggaatgacagaagagatttctctccagtttggttgtggccccttctcttggctcacagttcttctctgtggctctcaggccaccatattttatagtctatttaaggaaagagagagataatgaacttggtttggaatcttacttcatgaaaatttcacagaatttaggaagcatcttgtctaaatatcttgttctaaatttttagtgttcttctccagtccttgtgtgctttagggtggttttgattagattgggcttgacagttacccagtcccagatgagtgtcccctttcctgcacctccccccattcacgacatggaaatggaaagaatcgagtgaggtctgaaccccaggtaaaattggcaagctgactaagttcgccttgggtgacctcaccttttcatttctgtccattttcctctctttttgttccttgccatctccccatatctcaaaaaacctggaccttgtagcttttctatactggcccccaaaataaaagtctcttttcaagcaacgatctctaaactcatttgctatggtattgataacaggtatggattagtcttatcactcccaagagtattatcattttgggccaggtgtggtggctcacacctataatcctagcgctttcggaggccaaggcaggtgaatcacctgagtgaggtcaagagttcgagaccagcctggccaacacggtgaccccttgtctctactaaaaatacaaaaagtaactgggcgtggtggtgggtgcctgtaatcccagctactcaggaggctgaggcgggagaatcgcttgaacccaggaggcagaggttgcagtgagctgagatcctgccattgcactccagcctgggcaacagagcaaaaaaactctgtctcaaaaaaaaggtattatcttggcagggacagcagttcctatttcttaattgaagaaatccagatttcttctcattccaagagtctgtcaggtaactttcactgttgatgttgctatttccatgccaatcaataatcctgatcatacctgtatcccttaaggaaatcaaataactgaaaatgaagatctgtggggcagataaattcaggaatatttcttcgtttatagaggattcacctcatgaatttgaaatatggcttggcttataaaaagttgatctgcctggagcttgtagctaacacctctgtcgggccaaacaataaatgcttacactgagaaagccaggtttgggatttcaaattaatgtgcccttaacataaactgcagagcccccctgggtggagggaactattacctggttctaatagcagatgttttctggccttgagtgccagtggtaaccagagtcacacattttaggattttggtattgatgagggtttcagctgaatattacttgagttgaactccagttatctttacctgtcttaaaggagcagctgccatagtgcctcaggtaaagttggcttgggataggctggcattgccttccagtccccagcctcaccttcctcccacctcttcactgcctcttttctttgccctgccccttcaggtgtcctgcgtggggcaccattcgagttgcattctagtgtattaggttggtgcaaaagtaattgcggtaatgtgtgtgtgctgccccgtgtctctaccttattcaagtttctttaaggaacagctgtagatgagttctggtagaactgggtagtgctcccagaagtatccccgtgggtccgtgagggttgggcattcataaaataaatccttgctctaacgatagagaccaacttctagagccagaagtgctcatcccaggaatgaccaggggctcccaaaccagcggctcgggccctctgcagtgccatgtgcagcctctgtgggttagaggcatggagctagagcagggtcctctgaaccagagccaggcaggacactctgagaaatcacaagcagaaggacagcaattctgaaagcagagcagaacagctggaaaaactgagctgatgaaaaggattatccgaatccaagcttggcgttccttgctctgtgtccagattaagaaaatgctagtggtttgcctaggaacacatttgcaccaactcctggcttattttccatgtgacccaacagctggtactagagacaccagctgctttctggtgggggcagaatgaaaacagcatgggctgaggccaaggcccagcaaggtcttcaagggcatcctatcctgcggccgccagaggggtatgtgcggagatcacaggcaatgaggttgtaatgagctgttaagctccctgccgtccctttaatgggtgattacagtaaaaagagccacataaagtacgttttcatctctcacttcagcccccgagagcctctgaggtcttgtttatccaattatcagacttgctgtggaggacggtgcttgctgagaacaagcatatcagttggaacatgatttctctgatggataattagctgttttcaggactcctcctattcagctgaatgttctcagaccagaagtctgatctggcctaacggggatgtgctcccatatcgcagtggagtcttaaggagtactacccaccttctcttctgcgggggaaaaggaatggcgtagcatgcatgcaggacctgaccggaaggaatgtctgcgagttatgatttagtgactagaacttctaaggaaagaaatgaaccagaaataactgcaaacgaagtggttaggaagaggggcaggacatggggagtatccttgaaagggacttaatttcatccaaggaaataggttcccagtttaagcccagttagctctgtattcagagtggatcttctcagtgctaggtgaaggaagggtggttgtgcatcagagtaagtgtccagccccaccctgaagactcccattcaggtggtctgggatggggcactggtggtctgacactctcttttgttcaaaatcaaagcgtccccctccttctcatggaagggaagcttccaccaacccttaatgagttcctgtaccatatggagttgtcaaatgctccataccgggcacagcggctcacacctgcaatcccagcactttgggaggccgaggcgggaggatccattgagcccaggagttcaagaccagcctaggcaacatagcaagaccctgtctctacaacaacaacaaaaaaattagccaggggtgggggtccacacctgcagtcccagttacttgtgaggctgaggtgggaggatcgcttgagccaggaaggtcgaggctacagtgagccgtgatcatgccactgccctccagcctgggcaacagagtgagactctttcaaaaaacaaaaacaaaaaactctgtcctaagtatcagatgatgcggaagcccagtacttggttttactaggcttagcaagcagtcgcttatggaacagaagcttttataaacaaaccatgtagttaggaagggcagtggcagcccaggcaaaatctagtcatttgaattagccaaggaacggagacaaagacaaagtgaatttctggtgctagttgcaacttggtctcgataataaatcaggaacacaatccccacattcctaatgccttgctccaaaactcagcaatcctcctatttgtaagaatgaaaaaattcaggagggaaccaattgcctaaggttatgacagcaaagctaccgttccagtataatattcagccactagaggacacaattcactcactttctagattcagacacacgactacctttttcgttacaaaacatatgaagtcgtgatttatgaaagtaggacacatattgtattttttgcccttgaagtgcaagaccaggaaaaactgaaaagtattgcagcatcctccgagatcactgttgtcattttttcgcaaaggattttattctagcctgtcagtttctgcctcctttcattagtaagtcctgaccttagacatctggcatttttttggaaggtgtagtggggagggggaccaagagatgcatcccttaatgtagctaaagatcgaaatcttctcattttggggagagttgcttactatacatatttacacattcaccaattttgtctcatatgtaaaccacagaatgtgccgaattttcctagaatcatggttgaggcaggtaggagtaaggaggtgctgtgtacattagtgtcactgattccaccgttcacaactccataccactctccttattttatactcttgagtccacagtgctttggtgttacagcccatatagaacggtcctacctaaaagtcctgcggtcggtttaacagtgacgagtgtcatttttccactgtcctttacatagaattcagcaggaagcttcatgaggcaccctgtttctacatgagttgccctggttggtggaggcagaagcaatggagaagtggtgatgaaattaagtcaaagttaggcttgcatttgactctgatcttgaatagtttgtctagattagagggagcacctaaaatccaaaaagccttttgtctttgatttctatacttttgttagttttacaaattattatttaaaatcagtcctttgaagtggcttcttctcttctgacgggacagctttgggaaactgtttagtcttatttcttttgctattgggaagttgtgggggacgctattttgcagctttttcatcctcagttctgacctcctcatgtgctttacagatgcccccaaaggtcagcattcatccacctttcactgagagtgtttggccatctctaaagcagaggtattttaacagctctccttaatggatgtcctgtggtttcaggcctcagacaggctgcccttgggccctcagcagaagtcgggaatcgtcttatacttccagatcgtcttttactcaggcaaaatatgagatgctgtgtcagggtttcccaagggaagaaactgagtgggaggtgcaggtaaaccccacagtacaaaataaaacagagctgtgagtagttgaaaggactgtgttttgacagcgtaataaggtaattgtttaaaaccatggctaattcatcagatgtcatgtgtcttttatagttaaaagatgaaatttctttacccactggtgtcaacaacagaaagattctaaaactttcaaaaaatgtgccagtcctggctgctttgtttcatgttctttgacaactttcaaaatgtaaattgagattcatgcaactattaatggaaatataaatatcatggcttcataaggataaaattagaggagctcaacataacggctcattttaatgatttctaaggggtttccatgcccaggctaataactgtacatttagcaataagcaaatctcaaagcctatttcttatctttccctagaattacagcttttaagcccaagctggtcgttccttttataccactccactcacttgataggggtgacatgggctgagctttctctcctatcagggctcaaagacaagtttagcagcgtttctaaacttctgtcaatcagctcacaggacacagaccagtttcgttatcccattaacagatttacatttctgttctctggaagtgtcagttaatgtccttaaaggtaatatacacaaatgtacacaatagtctctgaatttttctcagaagacacactcagaaaccttagaattctgattcattctctttggctcagacttggatgaatttgcttctcagagtagggacatgaaaattattcttaatttatacttcatgtaatctgtttcttctttctccctccgccgccctccaatagctcttctgagcttgtttgttcttcccctaactcccattgttgaaaacatggcctcccctcattctcacctttccaggaatctccttgtgctcctcaagttcggctcatcgcaaacttggagttctgttttctcatgcccttctttcattttcttcttttaagagacaggatcttgctctgtctccaagattggagtgcagtggtacgattctagctcactgcagcctcaaactgctgggcttaagtgatcctcccaactcagcctcccaagaagctaggaccactgctgtgtgtcaccacaccagctaattattttatcttttctagagacaaggtctcactctgttgcccaggctggtcttgaactcctagcctcaagcaatcttcctacctcagcttcccaaagcactgggaggtgccactcttcttgtgttttttacctttgcatttatttcctggttacaatacttttaacttaatggctgctgaactagattctgccaatgtacgtgccgtccaggacacgttcatgccactttaattttcttagaacatcaatgagatagtcttactagggagagataaagggcaggggtttggttttctggcaggttttctttcattttaataacgagccaacccacggaggaaggaattgattgatggctgcttcctcttttgtaaagaacaaacatcaaattagtggtttgtcctcactttgcggataagcagaataataacacctgtgcctctccctgcattattttgaaactaatataattttgtttggacagaacgtagatagcaaccttaatggggaggaatgtggaagaggaattactgaagggggaccagtcagcctgtcaggcagcaactctggtgccaaagaatggacataggatcagagctgtggacccccgtcctgtttgtaaacttcctgagggtggcagagattcataccctttctcccatcaggacaaaaatcagtgtgttggagctcactcaggaaatgctctttgggattggcatgggaaggggatgaggccgattgacaattagcctagttcactgggattttgttgtaggagctgggtggtggcaccatatggccaacaggggatgccagcgacatccctaatttctctggcttcctgataggtcctggtagggtcggggttccaccgggatttgcctagtatggtctacctctgactgaaattaaactctaagtaggtaactggggaacgcctttctccagagagaaggttttgatgtgatctcatcatcggggactggattggacctggagaaatcagtttttctatagtcttgtttctagagtggcaccctggtcttgggcaggtcagaaggacagatagttggtcaccatcttcaacacaaatcatggctggaaaagggccccagtagggagtgcctttctcactcaccaatcaccaaggctagaagatagtctgcagattctttcagatgccacaaagctgtgattacagctgcccattggcaaatcaggtactagtttttgttaatcacattgcagtcttccttcactgtttcttcccctggtcccggaattaaggctgggctccatttgacaagttatcttctgtgcaggtagagcagcaggctgtgttagctcacagcatctactcagtaggcatggaaatatccactgaatgggactgagaaagtggaatgggaggggaacgtgtgaagaacaggaagtttgcctctttatgtccaaagtctgtctacttagagcaacaggatggtgatgatgctttctggttaaagatgtcatggcaacagtcttccctagacagctctctagcaatagccagtggcatgtaaaccctgcatttttgcactgtatccagtgtttgcaactcccttgtagaactttccctgaagtcagcaagaaccctgtgagaatcaggatttgtctagaaatttagcatttacctaatcaatgattctctagacatgtcagtacctccaagtgattcatatgcatgtttggtgggcgtcgagcatgtggcagtttggagaaggaagtggagaatgcagcagcagcaggagaaatgtttgatgttgctaaacatcaaccccacagcaagcctagaactcggggaatgggaggcatggtgcgggtagctgctgacacacagctctagagatagctgcctgcaaagctggatgggactccaggcaataggcttcagggcctaactgctctttcaaggtcactgattgttacaggagccatggtctgcagcattgagcatggaattattattactattaagcatgatcctcaccgtgatgctcttggggtggaacaaaagagcccagagagaatatgcttattttatgcaacctctaacgtttcctcccagagttgtgatgaaactgaaccaaactctagcatgagaatcggcatcccaggccagcagccaaaacaagtggtgacacttggccaggcacggtggctcatgcctgtaatccctgcactttgggaggccgaggcgggtggatcacaaggtcaggagtttgaaaccagcctggccaacatagtgaaaccccatctctactaaaaatacaaaaaattagctgggcgtggtggcgggcacctgtaatcccagctacttgggaggctggggcaggagaatcgcttgaacttggaggtggaggttgcagtgagccaagatcgcgccactgcactccagtccagtgacagtgtgagactctgtctcaaaaaaaaagtgccgatactttatatatcttctgaaagaaatgaagtctgtaagaaggactgttaaccctcagaatggtctggggatgctacatccccttgtggacttgtcacactggtatgagtgtagggagtgggaacacttcttctcagctccttcctcaccatgtgtcattcagggacaaagggagcaggatatcttccctttgaaaaatctcatatgcctggcaatactcgtcaccctgtgaataatgttgatgcattcacctaaccagtattataagcccctgctgtgtgtcagacactatgcttggtgctgaaatagacaaggaggggactgcctgtcttggaaggcaaatcccagtctcctaagagacactagaaccacaggcaaccatgctgatctatgcaatgacatgtaatgcaactttgtcctgcaaccaccttgagatctttgaaagttctcctacctccaaaactcagacaagtcctctctcttgccaagtgcctaaagcaaggatatgtttatagaggcagctgggggcatctggccaatttatttcccagcagacctgctgcttcccctgattccaatactttcttccccaacccaaaccaaggcgtctggcaatgttaaaaacatcaagaatgataaaacaagcattttaatgaagattattgatgtattcattggctgtttctttaaatgggtagagaactaataaaggatctaccccaaataaccaaaaatatcagcctcagcaccagcagaaattggaagcgttctggtatttatatgtgtttttctcagctggcagatttgttttaggaaactatttgcaaagcctgggaaaaatgtgctttctctgtctgttaaaggaacatgcaggttggttggtgctggttctccatctgacagttctgtctggtggcctcaaaaaaaaagaaaaatacagcatagtccagatttggactatgcaaatggtgtcttgaaacttaacttttaggtcttgagcaaagccaagtattattgaaatgtttattttgtttttatctgcaggaggttttcattcaaaatgtggtgctttgggggaaaaggaagggtgtttgtactaggtactttttagcattcttcttattatctgacctatcacagcctcttcaggagacattaattaatttagttcatataatcaacactggaaccaaggaaaaattatttatacttttagaaattctcatgttcttatacttctttggagattgaattgactccaaagagactattttgtgattaagaatatttttgtggccgggcacggtggctcacgcctgtaatcccagcactttgggaggccaaggcaggtggatcacctgaggccaggagttcaagactagtctggacaacttggcaaaaccctgtctttactaaaaatactaaacttagccagccgtggtgacgggcgcctgtagtcccagctactcgggaggctgaggcaggagaatcacttgaacccgagaggtggaggttgcagtgggccgagatcacagcattccactccagcctgggaagaatatttttgtgtggggagtcgttatattatgtccttagaccaggaggtccaattgaggcagaaatttttgaagtaaaaccattttttttgaaggaaacacatatttaaatatcaaagaacactggacgtatacttttaaaaatttacatacttgtgttagttatctattgctgtataacaaaacctttgcagctcaaaacaacagtcattatctcacaagtttatgtaggttacgcaggtgcagctgacctgcttggtctgagctttcgaaaagtgcagtgaggatgtcagcctaggctgccgtcacctcaagggtcccctgggggtggatccacttccaagctcactcatgtggctgttggcaggatgcagttgctcacgggttgttaggctgagggcgtcggttcctcactaagccagaggcttccttaagttccttaacatgttttctcatggggggcagctcacagtgtagcaattggcttcgtcaaaacaagcaagcgggagggtaagagacagaaagcaagacagaggccagggtctttcacagcctaatctcaagagcagtacctcatcacttttgtcctattttgacaaacgtcgtattgacttttgtcactacatcagaagcgagtcactaggtctagcccacactcaaagggagaggatttcacagagcaagaatatcaggaagcagaatcattggttatttcattagaagctgctggcacagttcttaatgaagctacaaaacattgaactgggaggaatatgggggtaggagggtgacagggagggcaggttaattttgtggatgctgaggacaacgtgcctcatgaaaagtgttcccatcagactggtgtatttctgtttcttttcttttttttttttttttttttttttttttttgagacagagtctcgctctgtcaccaggctggagtgcagtggcacaatctcagctcactgcaacctccgccttcctggtacaagcgattcccctgccttagcctcctgaatagctgggattacaggcatgtgccaccacgcccagcttattttttgtattttagtagagactgggtttcaccttgttggccaggatggtctcagtctcctgaccctgtgatctacccaccttggcctcccaaagtgctgggattacaggcatgagccaccgtgcccagcccagaatggtgtatttctaggacatctgcaatgcatcactctctaataaaagaaaaaaaaatagccactccttgacagatactcaaaggtgtggagtcccttactaaaccacactccaaagaaataagcctgcaaaatagggaaaagttgttttttacctagaaagcagattctctgcattttcttattttcaaatagtggggagaaaccctaagctgtacatatgaaggaatggattcatttctcctcttgcacagcaccccagcaccttgtacaccctattcctccctaactcccaaccgcacactcacctcccaagcatctgcagatctacatacatattatcaaatgtacagagtactgagtgaaatggtcactgtagctatggaaaggtgagatttgcaggctgtctgaaatgtttcttgctaaagtagttccaatccttcccccatttagaaaaaaatacattcttagtaaatgactttcaggcagaaaaagaaaaccacactggaaataggattctaataaaccaacatggggctctagctggtgaacatatttctgagccatccctatacagaaaccacaagacaaataagaaaaagtaaatccagatcacttagacccttcaaaccacatcctgggttccaaggacagtggctgcgagttaggaaagatacatttatccagtggaccttttgactgtcttgtcaatcttaagaaaaaaatgtagagtaaaaaattttggctgggcgtggtggctcacgcctgtaatcccagcactttgggagaccgaggcgggcggatcacgaggtcaggagattgagaccatcctggctaacacagtgaaaccccgtctctactaaaaatacaaaaaaaactagccaggcgtggtagcaggcgcctgtaatcccagctactccggaggctgaggcaggagaatagcgtgaacccaggaggcagagcttgcagcgaggcgagattgcaccactgcactccagcctgggctacagagcgagactctgtctcaaaaaaaaaaaaaaaagaaaaaatttggtttgggtcccttcccaccttcccttgcttcatcactttccttaagcctctaagcatccagatcttccccaaagcagtgcttcctagtcagtgattaccctatcctctttttattccttttcttcatgcacaccttcagtccataaatccaagctttttgtaaggagggagggtgagtaaaccaattcatactaaggtgagagtgaattatatataaacctcttaatatattaaatctaccaagcagtgtttcagaaggaaatctgctaacatgggcatcttacttgaaaaaaatttcagttggttcaacaaagtatggtttagaaatcattttcaatcaggatcggggagagaatttttttttttcttaaagcagttaggtttccccagcagatttcgaatgcttggatatttgtgattcttttctatgggaatctgatctggataagacctaagaccataaacactctagctttccctttgggtctttgctattgaaaactagttggacttaaacaagtgaagtgggttttaaggatggctcctttcacccatttctaaaagatagcattcttgagggtctgctttatttagcagaaggaatgctggttttccaatctctcactcaaaaggaacttttacttatctcatagaaaagaatgggatggagattaatgtaatagaaaaggtattctacaaatatcatagcagctatatttaatcaattcatgttcaaagatcaattagtagtaataagagttgtgctgtataaaatcaccatatctcatattcaaattgcagatcatcagttgaaaaagcatggattgttttctcactgaaagaaatctttaaaagtggtaccataagagacattaagactggctattgttttatttctctctctctctctttctctttctctctttctgtcatttgatttctgactttcagtggatttttttaacattacaaaatcatagagaaagaatattggaccatttattgtagagtttttaaacaatttgataccattttttttttctggcgtcttaactgcatttgctgtttgtgaggggtgtagaggtccctgatgttcagagtacagtaccagcgtttatgtgaaatattgcagcctggcctgtggaggacaggggttactaaggggcaagctgctgcttgcgataacacccccagtgcctccttctaatcttgcgccatttcccagggcagacagccttgtggggctctgactggtgccctggaacatgttttaccttccatttttcttgctctgatttctgaagacagaatgttctcttcaacctacacatcaggagttttccttctgttttcctttttcactggttcctttgtgaatttgcacttttatctaacctaaaacattggaaacaggaataaacacaaataatggcatgaggccgtggccacagaatgacaagacaggacacagcaaatgttttgggtttttttcacatttatgaaccttctcattctatttatttatttatttacttacttatttcttgagacagggtctcattctgtcacccaggctggagtgcagtggcatgatcatagctcactgcagccttgaactcctggactcaagtgatcttccagcctcagccttctgagtagctgggattacaggcatacaccaccatgcctggctaataaaaaaaaaattctgttgtacagatggggtctcactatgttccccaggctaggctagtctcgaactcctggcctcaaacagtcctcctgccttgacctcccaaagtgctgggattataggcctgagccactgtgctcaactgcttcccattctaaaaagtgtctaaggcagttatagaggttatataacaaggtataaaatttctgagtgaaaggaaaataaggagagagaaataaatctaagtgtgtgtaaggttaatatgtacacagaatgtttattaaggcctttgacagttcctttaaaaattacctgcaggccaggtgcggtggctcatgcctgtaatcccaacagtttgggaggccgaggtgggcggatcacttgaggtcaggagttcaagacaaacctggccaacatggtgaaaccctgtctctactaaaaatacaaaaattagccaggtgtggtggcatgtgcctgtagtcccagctacttgggaggctgaggcaggagaatcgcttgagcccagaaagtggaggttgcagtgaactgagatcacgccattgcactccagcctgggtgacagagggagactccatctcaaagagaaacaaacaacaacaacaacaaaacctgcaaatttgagctgcctagcagccaagcaataaagggaatcacaatgaacgataagattcatatatctgccaatttaaaaacaaaccagttctcttgggtcagtgcttctcaaacttgaatgtacatttgagacacctggtgcattgttaaaatgtaggttctcatctagcaggtccatggtgcatttctaactggctcccaggcaatgctatgctgatgctgatgctgacgctgacgttgatgctgctactcattggactgccctttgagtagtaaaattttagctcactcagaaaaacctcatagtttatttggagtaacatccctttagcccttgtagatattataagactacattacaataaagttctggtgagtctaattgttgaccagagagattgtttacttcagagcacctggatttgaattgcagtgtgccacctgctgctgtgttacctggtacaagttaatgcattctcttcacacctcagttttatcatcttctgaatgaggctaatagtagtacctgtcatagatgcttgtaacagtgcctgcatagagtaagaatgaaataatgttagctattttttattgttacatttaaaatagattttgctggtagtgaaatatgaatgataaaatcatctcctcagctgttttccttgcataagtaccttaaaataatgtatttgcaatttccttctgaatccttgaataaaagacaccagataatcagaagatgttactgacattagtaggcatttgaagttcactctgatgggatcagtctatttacaacaaattgctatagagagtaaaaagcgccaaccttttcctgtagtttttgaatgacagcatctttgttcatgcagttggctttgctgcatttccacttcatcaattttttggctctgtctttgcaaaaaaaaaaaaaaaaaaaaattacagagggagaattttaaaacacaaatgaagaaaaagaaattactttgaaattgccaaaattgtttggctgaaagagcttatttagaaaaacagagctttttatgtataaacctgtttcattggtgttgtatcagaattgcatgttgctagtagtttactatcaaaacaacacttgtgtttcaagctgttaaaaaatgaataaaataggccaagtatggtggctcacacctgtaatcccaacattttgggaggccgaggcgggcggatcacttgaggtcaggagttcgacaccagcctggccaacatggtgaaaccccatctctactaaaaatacaaaaattagccgggcctggtagcatgctcctgtagtcccagctactcaggaggccgaggcaggagaattgcttgatcttgggcagtggaggttgcagttagctgagatcatgccactgcactccagcctgggcaacagagcaagactccatctcaaaatttaaaaaaaaaaaaaaagaataaaatagaaacactgatttttctggtattttatacccttccccgaatatccatacccaaggcatttttaagatttccctaagctggaagcaccagaccacatgttatttaaaacatattaagatgtacctactgtattatgtatactttgtatatcattttataacagtctgcaaagtagcaggaaaaaatttttgccttcaggttaaactcagaagagttgccattggctaactgaaaaattttgcatttggtaagcatttaattaaaaatttattgatttcggttttgaggttttacttttcatatttttagagccaataacttctggaatctcagacatttttgtggaatcttaagttgttcatagatcctaggtgctgtgtttgtcatcctgagagcttaaatggccctgtccaaacctcagcctcagctcagagtaggaaattgtcaagcacttggtaactggtaagcaaatggattttagtcactaaatggagcgggaggaatggagtgctccctcaaaaagagcatttcagctggtcacagtggcttgggcttgtaatcctagcactttaggaggcccaggcatgaggaccacttgagcccaggagttcgagaccagcctgggtaacacaggaagatttcacctctacaaaaagtaaaactaaaaaattagccaggcattgtggtgccttgaatctgtagtcctagaaacttaggaggctgaagcagaggatcgcttgagcccagaaagttgaggctgcagtaagctgtgatcacgccacagcactccagcccaagcaacagagcatagactccatctccaaaaaaagaggctgtgacagaggaaggcagggggatgttaatcagagagacatagagactgggagagtctgaaagagaggcagagagacttacacaaattaaagacacagactgagagaaatggaaaaatgaagagaggatcccagacagattgattgacttcccaggtaacatataatatcttacaatcctgcagaatgtttaaagttgcattttaaaaggcactccgtttgttcacacaatcctggtaagaagatcatcttaattagtatcatactttgcagctttcaagcagttcttaggcatcattgcgtttaagacctggctccagccgttttattacagatgaggagattgacttgttcaccttacatttgtagagcattttgcaatttttttgaaggacatttccacccattatctaatcacaagtctccataaatcccatctcccctggtataaaagcagcttaaattacaggtgctactaagatgcaaaatgcagcccacaaaatcagcaaatattttttctttgtttcctccttttttaaaaaaggcgtagatttcatattactactttgtttcaggccgtatattgaagtaacaaaaataaaaccaaaattgacaccaattttatttcgaaataaaatctacttttttcactttcccacatcattttctagctgctaaccttcatgcatattcaatttttgcatatttacagccctgtcaaagataaaattttattttctgcattttcactcaacattatacactgagtattggccatttcactcatctcagtgccactttcaaagagatacccaggaaaagcagcagcaagggttgttcgaccttgaacaactacagataatactttggctctctttgagatttttaaggccctgtaagtaaaatattttcagattacagaaggcttgggattctgtctttatcacatgactgattggtcctccatgttctccttggcagatgtgggtatcagtgacacaatgttttttactcaaaacatggtttagcttaccagtaccaggaatggccgatgcatacgcattctcattgtgaaggtttatttgcacctccactcttcttaaccaggctattttcacagaagaaataaccccaacttcatgaaccctattcccatgacctatttgccaatctgttaaaataatggccaactcaaatgatcagtaatgattgactcaccatgacatcatccatcacctttgtcactggaagcccacttgccttaaagggtgcagcatcttccaactttgctccagcaacttcagctcctcattaaatccctccctgtaggtcatccctgcaaccagttgacactggagctcagcagccagctgataggggccttcactcctcttgtcgagctgctcctctctcctctcaaagccctctttccttctctcctgctggctgacctagaagctcagctaaagaggtgttcaaagggtccagtcgcttaaacaggtggccagtgtgctttctgctataactccttgctccttgagctcagctccaagctgtagaaggccatggaagagcacattgatgtcatcttgggaataattaacagggtccggtttttctgttcgtttccttgcaccagatgaagagtaggataaacttgggagaagccaaagtgatgtttttgtattgtggctttgaatgatttcaaggtcccttggttaacctattctcagcaaaagaaatagaagatggtcccaagatggtaagagcagagtgtttggttgataatttgatctaaaagtgaccagactccacaagttaacccccagagctgctcaattacagcagtttaaaaataagttgaggattcgttgctaaatcagtggaaagaatttggagtttccaaaatagtttgtaatcaagaaaagccatctgaggaggccctggagggaaaatcgctgatgattatcaaatgtccagttctcaatgcggtggtatatgtgactgaaaaaaaccacttttgtccacatttggggaaagataagattatactaaatgcctggcacatacactggaccttcagttacctagaaaactttcaaaataactttgccataacaagtggcaaattattaaggtcatgggctgtcttctcaaaattacttagataacatgattctctggccagtatgagacccttaatttatcacgtatgaagcatatgagcctgtttatccgttcgttaatcattatttttatctggcttgggctctgggttactggccatgcaggcagatcttcccttccaaaaggaaacgttattattctcttgtattcgtttctttaaaaacatgcagatttaacaaaacatattacttagcactcttactgatttagaaatatgatgacccttaggaaatgcatctccttaaaagaaattccaggcaaactcatttaacctttctggatgttagtttcctgaccttcaaaaaatgggatgttggaccaaattatcttgaagtttccttccagctgtgtgctcggtggggagtgctggcagtgtggggcaggacactgaatatctgtggtggtgatgtttggatacaggggtgagcaacccctttggaagcaacatgcaaaattgctgagcagtggtgggggtgcatgggaatgggtggcggtgcccctgtattggagtgtaagagacaagtgtggtgagagcagtctggcagggctactactgttatgatttacacagtccctttcatccagctacttcaaagcaccttcacaaactctggctcattattccttcaaacacagcattcaagaaagattgataggcgccttttaattaattcaaagatgatgaagctgagcattacagaatataaggggattcttccaaaagtatctgcactgcagaggggcatgatatataaagtgttcatcacaggtttctaactgaaacaaggaaatgacctgaacgcttatttttagaggagaccagtatatattatggcatattcagaatatgcaataccatgcacccattaaaatcatgtttattaagaatagtcacattagggaaatggtcataactgaacaacgtttagtggcataaaaaaagataaagctttgtacatacagtatgatgaaaatgtttaatgtggctgggcatagtgacttgtgcctgtaattccagcactgtgggaggccaaggcaggagtatcactgaaggccaggagttcaagaccagcctgggcaccatggtgagaccctgtctctacaaaaaatttaaaaattagccaggtggtcatgatgcatgcctactattctagctactagggaggctgaggctggaggatcactggagcccaggaggtcaaggctgcagtatgccatgatcataccactgtactccagcctgggcaacagagtgagatcctgtctcaaaaattgaaaaaaaaaaaaaaaaaaggtttaatgtgtagaagggaaaaggctaaatggaaatgtgttaaagtcttaacggtgatcttccttggagcaatgatatagtgggtggttgctattcttttctttatacttttatgtacttttatgttatgcaaggttgaaaaaatgggcacatattgctttcatagtcatttctgttaagataatcatatgattatgaaagagggagtgtgtgtgtgaaagtggaatggaccaatcaaatagaacagtaggaagacctcagaagatatgacacatgagctcaaccccaaagatgagaagaaccagccatttagtgaatggggaagccctctggggaacagaaggcacgaaggaaggaataagtttggaatgttctaggttttgaaaaaaggccagcatgggagaatgatgaaagataaggtcagagccattgccaagggcaaggtcatgtaggacccatgacgaaaagtttgggaaacccttgtaggggactgacataatttattttacatttttgaaaaatccttctgaccaatatatgaggaacattgtaagaggcaagtgtagaagtcaagatctattgagaaggcgttgcaggggtccaggtgagaatgaggatggttcagagtggagagacagggacaaggtaagttggagtgtgggtctgacttgttagccatgtggaggaaataattatcataataactatcatgtatgtttttagggggctctataacttcagtatgttttcagtgttcacatttgtaggtttacagagtttgtacttgataaggtacagaagtaagtcacttctcaaaaatcatgcctttagaagcatatatcatgcttctattatagtaatgataataatagaagtctactgctagtcataaaacttatctgttcagagaaggctttttttttttttcagagaagtcttccaggtttcagctgttgctcattaatgctcaccacagccctttgaggtcgatgcaattatgctttggaaaagctaagtaacttgccaaaggccatgcagctaaaagaagcaaaagctggattcaaatctcagctctctgcctccagagagaacaccctcaatcccgcttaacagacattagctctgcttatttgattggtggcagtggagatgaacagaagtgaacagtgagcagagaggggtctgtaccccacacacatccctgcaccccaactgtcaactgtcttccatcatcatttactatatccacgtccactcctgacagcatcagtggctcagtcttaccgacctgcatcagggttttgggctctgcctctgtttagacagagcacgatttgggaagtgctgctaagtcagccagtggctgagtagaaacagccctgcagtgggcctctgcctgctctgtggctcgtttatcatgtgtctcatctttaaaagttggggctcagtctaggtgcctcctggcctgagcaccccagaattctatgctgatcccttcattgtgacatggcctgtcatctactcttctgggaagaccatctgcacctcactgatacttgaagctcattgagtattgtcacatatcagcccagaaagtcacagggtacagcaactcatacttgctcccagcaccaggccagccccattctgcctccagggagtcacccaaaatagagagatgagggtaaaataagacctaggaatactatttatttgcctccatggcctttgaacttgcacatccaacgtaacggctcctgtgtgttcttgattgttccaattatcatttttcctctcgaatacctgagagcattcattattttgcaagagatttgagaatccctgtgccctaacttttctttccttgatgtgggatgttcttctgtgactaggtaagtttatctcaatgtgtccccaaataatttctcagaatgttaaattcataaaagctaccatgaaaggataaataaatgaaaggagttctgaggtcaaaacatttggggaaagaagagtctttctccttctgaggcattctcagtgcacagtaacctgtttatctcgctttgccttgctctttcccaagcacatttttgctcaacgccccctaccttccccatacacttgttaacactttgcagagcactagggctctgtgggacaggctgggaaatgcaggttgacatgccactgttaatacctagaaaattaaggcaaacttgtccctgagagatgtcaggatagcacagtatggaaaggccatgcttatcagggctcttatctgagagaatacagtggttatgagcatgactctggaactagacagtctgggttgaattccccgctctgccatttagttatatgatatggggtgtattacctaacatctctgtatctcatttgttcctcacttgtgacatggggatgatgacaatgataatagtaccaacctataggatagctatgagaattaaacaaattagtaaatatgaagtatttggaacattggcctgactcaggataagtcctgtttaaatgttagtatcattattattgtttcttcaagccaggaatatacttcatcaattatgtgtacactcattccttcattcaacaaacacttacttaatactcctgtgtcctaggcactgttctagtgctggagatacatcagtgaatcaaaaacatgagagaaaaatccctgtccttgtggaacttacactgtagtggaatctactactaataatgcaaatagaaagaaaaatatatgcaagttacccaggcactgggtagcctagtacctgtcctatagttgtcaaatggatggatatattattcttattgttgttgtcgtttacagtaattgagcttggaggtttgagctgccatcttagataagaacagaaagctaagccaatacgagtgccatgccagtaagaaaaggaaactattacataaagattaggaagaaaaaagagaagaatgacaagtaggccattatctatggccatgagttttatttaaaatgagctggaccttttttgccttctttatctgtgtatcagatagacaattacctctaggcagatttccacattccaagacatgaagactttctaagctgcagcagacacatctttacttgtagcaaaacagagagcgatgggggttattttcagatgactgtagctgaagaggaagaatcaagtaattcactccccccaataataattcacttctgagaggaaaaacttctttggaaaaagcaccccatgaatggaagtctcagcatttgctgaagaacttagttaaaataaactctagacctttttcattgattctttatctcttcttttccagaaaccttctctatgtctacccacagaggctgaactttgtaaacaaactagcatcagcccggaacattacaataaagatccagtttatgtgtggagaagatgctagcaatgcgatgccggtaaggagggaaacgaacatttgcctcaaatcagggtgggctgctcacccctgtcacttcacacaagtccgggactcatcagtgtacaaagtccgtctattccaggccaatactgctcagcatgtgcaagggcttctgtgcccaggatatcagtggggaaacagggtcagtcttacttgacgatctctttctcggcttattctgtagtgagcttggaacatacagatcattttagaggattaaaaaaagtcataaagtctttccatactgcccataggaccaccccactctaaaggcatacaaagtaaagagatggctcaacacgtgcgccatgtttgctgagtgtcttccatgcacaaactgtacacactgtgttatacacacacagtgttacacacttactcaagcctcggaccacagtgctgatgaatacaaagtaccgcctagtaattataaacacacaccacctccacaccttctaggagtggatctttgttctgaggcaaaatataaatcaaattattcatatatatatatatatataaaatgcagtgtgctccaaggaactcaaaatgccagaatttatactttttaaaccatctcctactaaatgagatggtggttagctattactatttcccataagtcatagaattcagttaatataactttctttctttttttcttttttttttttttttttgagacagagtttcactctttttgcccaggctggagtacaatggccgcaacctccacctcccaagttcaagtgattctcctgcctcagccttccaagtagctgggattacaggcgcgtgccaccacgcccagctaattttgtatttttagtagagatggggtttcaccatgttggccagggtggtctcaaactcctgacctcagctgatccacccgccttggcctcctaaagtgctgggactaaaggcgtgagccactgcacgcagttaatatacctttctaaaaagaaaaagaaaaaaatcctttctcttaatgtcccacccaaagaaaaaaagaaaaaaaaaaacctttctcctaacgtcccacctgtcttcccaatgcaaggtgtcttaagacagcggtggggtcctcttagtcctctctgctcaggcccctggcatgccactgccaggagtgccagatatgcttgtgcagatcctgtggcaaccaagatgcccagccaagagtgactgtgggctaaagtccagtctgttcttcattcactgagccatgggttctggtgttgggattactgcatctagaggaaagagctttttttctctgcacaaaggtgagtgcacttgttcataatgcatcctaaatgctgcttcaggcccaaggaggtatctttttctaaatggcacaaatgtggataaggcagtggagattcaaatcacctaagtgagtaggtctgtatgtttgagagagaagaacctggaactggggatttctcactcaagacaaaagtatgtaactttggcctgttggatagacctctaggcagtgaggcagagtggagagagtactggttttctaatctcacaaacatgtggcctttggtcactaatatagccccttggaacctcatttcacccttcatagccagttcctttgcactggtgtgcttgggccagttgtagtcccagcacttttttttttctttttgagacaggatctcactcttgcccaggctggggtgcaatggtgcaatctcgactcactgcaacctctgcttcctaggctcaagcgatcctcttgcctccgccccctgagtagcagggactatacgcatgtgccaccacgcctggctaatttttgtatttttttgtagagatgaggtttcgccatgttgcccaggctggtctccaactcctgggctcaagccattctcccacgccgacctcccagagtgctgagattacaggtgtgagccactgctcctggccaacccagcactcttaattgtacaaaatgcagctctatgagaccagaacatcctgttggcctgatgatagtcaatttgatgtacccaaatgttactgataatttgatcctttctctactggtgaacaggtcatctttggaaaatccagcgggcctgaatttctgcaggaagtgtacacagctgttacataccataataagtaagtctatttcagcattctaaatatatgccaagatggtttcatcatctcctggtttttccaagtcccgtgggtggttcctcctaactatttttataattcagggactgaggggcaaaggaaatccatgccagttccgtgactctgtgttgaagatgtataactttgccattaaccaagactgagagaagaacgtgtcttcaagaatccaatatagttttgacttttccagaagcttctattctagtatgatgcaaagaggttgtattacgttaattaaggaaacacatttcctaacttgctttgagaccctggaggggaccagaagcacagtccggctccccttgccctgtgtgtccctgtccgctccacttgacacctgccccactgtctgcctaggctgaccaaaggagaaatggaacactcattattccaccggcaaatggagtcatgggataatgcccaccctattattcatgttccacagggaagggagagacacctgcacagtgttggacggaattgggtttgatccgggcctgataacctgggcctaattaagtccttcatttaagcacattctgggattgggatgaggattaagtgaggtaatgtacattacatacctacattactttacaatgtacgtaatgtacttcgtaattaatgaagaacctagggcttcataatgcagttaaattggttcctttttcctcctgcctcattcatttgcttctactctttgatgagtgcagctaggtgctaggcttggttccttgggtagaaatggaaaaaggaggtcacagcaggagtccaaacctcatcctttcttcaaattaagttgttggagttttccattgtgtgggggagttgttttttgttttttgttttttgttttttgtttttcctgacaaagcctttagttcatgaacagttttatgtaagggaagtgcatctaataacataagcttggtctcagggacttccagcttcagagcagagtaatgtaaaatgaaaagcaaaacaccaggcaaattctgaggagcaaaggggctgtggcgttttacaatcagagaagtcatcattcttgctaaaagttatttgtgtataatgtgcttttgaaacaggtctcctgacttttatgaagaagtgaaaattaagctccccgctaagctcacagtaaatcaccacctcctgttcaccttctaccatatcagctgtcagcagaagcaaggagcctccgtggaaactctcctgggatattcagtgagttgtttccagcctgctgactcacactgcagttgttggtgcatctgaggtccctgcagagataaacaaccaaattctattcacttgattttttccagtcagaagtagcaaaacatgctaagccacattatagcaagaggcagaaatgatttgccttagcaaatgtcaaatttcaggaatggaaagctagcgggtgatagatgttggaagaatactcatctgttttttaaaaagcattgcagtgttcactatttccaaatttaatatccatgcttcacgtatagaactagctttgtcccccaagaagaaaccattttttctttaaaagatataaaaggtgaaataaacattgatgttgttcagacacacacaaacattggctacagagaaaaatgctactgctttagctccaaaagcaataaatcatcaatattaccatttcaggaggtctcggagatttaaaatgcaaagaactggacagaaattactgccaaaaagagtactggtcaatatctactcactgtttagttgcatttgattattgcgagctagataaattatcagaattatatgctgtaataaataccactttattatttacatcatctgtttcagtggctgccaattctcttaaatgaacgtcttcaaactggatcctactgtctcccagttgccttggaaaaattgccacccaactactccatgcattctgctgaggtaattggcaagctggccatcagctgtttcttgtccagctgtagtcttggaccaccttcccagactcactttccattcccatgtggccatggatgttcatcatgttctcagagagcacattgttctgataggatgggaggaataactgactgtgaaacctcattcttttaaatgccaccaaatcagaatgttcagtagacgcaacctacacccaaggcagcataaccttgcattatctaccacagagggattcccagaataatgtattatagaagaggaggcaaactaaggccattcatagtaaacaactgttcccatcaaggatccttataaaagattcccaggccagattcatccgtttctttcttgggtcagttgtcacagccctccggtagataccaaggtatttattctcctaccaatcccaatgccaatagcctttcccacttcctgtttctggcactttctcttgctcatccactctgctgcagtgcacccatttaaagagaagcccaggtggatcaactgaggtcaggatttcaagaccagcctggccaaggtggcaaaaccccatctctactaaaaatacaaaaattagctgggcctgctgttgggtgcctgtaatcccagcactttgggaggccgaggcaggcagatcacttgaggtgagaagttcaagaccagcctggccaacatggtgaaactccatctctactaaaaatacaaaaaaattagccgggcgtggtggcgggtgcctgtaatcccagctactcgggaggctgaggcaggagaatcgctttaacctgggaagtggaggttgcagtgagctgagatcacaccactgcactgcagcctgggtgacagagtgagactccatctcaaaataaataaataaaaaataaataaagggagcccaggggactgtccaccctgactgcaccagctgtcacactgctagcccacttctcagttccttgcataggtttacatcaataagtattattttgaagtaaatctcggacatcatatttcattttagtctgcatcttaaaagataagggatttgtttttaaccatcacaataccattgtcatactttaaaattttaactgtaatttcttagtatcatcaaatattcagtcactgatcaaatttttaattatcccactaatgctatatttttgacgcttgctttttaaaattggtattcagataaggtccacacactgatattgattgttacatctctggagacgcttttaatctacagatcctccatctcttttgctttccttgcaattttaagttgaagaatttctcagaaatttgaatttaatttcaaccgttccagtcaactttcttctctgttctttcgccatctaccgtctcacttccggctgttttcctcttattttcttttttccttaaagagagaaccaacttttgccctggaccacaggcatgtgtctggtaaaccaaaacttctctcatcaaagccatctaaggggcaatccgagtatgtccacagacatttccctgattggtctttatgatttggacatcaacacctttcagtatccctcaaaaccaccttcttatcatcaagttgcacactctaatttcttagaaccccctattatctttttaagctataggaaagacctgagtgttggagagagacaaatctgtgtccaaagtctagattctgccactccctagctgtgtgaatgttggtgagttgcttaccctctctgagtctcgaagatgaaactgagcccatatctgcatatctgcctataaggttgctgtaagcattaaatgagataatgcttgccaaacaacaaactcaattcctaagtaaacattaattcctttttcttacttgcgctatgctgtgtttatagatatacccttagcctctcttagtatcctttaaacctgcactgtctgataagatagccactagctgtatgtggctattgaggaaaatatggctagttcaaactgagatatgtgctataagtaaaatatgcaacagatttcaaaaacttcatggggaaaaatgtgaaatattgtattaataattttttacattgattacatattgaaacagtctttaggctgtattgagttaaatgaaatattactttcacatggtccttttgtgtttttttttttttttttttttttttagagacagggtcttgctctgtcactcaggctggagtgcagtggcgtgatcacagctcactgtaatcttgaactcataggctcaagcagtcgtctcacctcggcctccttagtagctgggactataggcatgcaccaccacgcccagctaattttttttttttttttcattagaaacagtgtcttgctatgctgctcaggctggtctcaaactcctggcctcatgtgatcctcccactttggactcccaaagtcctgggattataggtgtgagccaccatgcccggcccctttttacttttttaatgtggccactagatgattttaaattacatatatagctcacgttatatttccactggacagtgctattttagatcacagatggcaaactcaagtgcccacaggatccagatgagtaacataaatgaatgccttgttctggtggcatctgttcactctggagattgtctcttccccatctgaaggtcacagctgttctcttcactctgcagattggtgacatgctgggatataaggccaattttttcatttcttccagtactcaaatgaagttagaaaagcagtcttttataggaaattttcaggctttcaaatattggtaattaattttttaaagttcctaatacttcaaacagaacgtgtgtgtaggctagagcccactttgggccccagcttttgactgcttcagatagctttaaaggtctccatcccctgtacacatctacctttcattatgatgaaagacatacaaacctaggcgaggccctcactcaacactgcaggacatctctaaaggaatgcaatttcaatgggaatttaaggcaagaaactgtctgtaagacctacgaaggtaatgatatataaacgtataaaagagtcactttgagtaattaaagcaggagccgacctggcctagaaacatgtgggaaacacttggaaaaactgtggtgaaagggaaagtaatatcgggtactcaaaagtattaaaatttcatgtcttgtaaagatattctatactttgtcctgacaattctgattaatggggaaattgctgggatcttaatttattttaattcctagaatccagaatcatcaatgctggtttggaacttagagacagattacaccgttcagccctcttctcacagcatgagaacagaacactaaggcccagaaagtttagttgagtcgtctaagtaaaaataactagtttgaagcggggcacagtggctcacacctgtaatcccaacattttgggaggctgaagtgggcagatcacttgagcccagaagtttgagaccagcttgggcaacatggtgaaaccacatttctacaaaaaatagaaaaattagttgggtgtggtggtgtgtgcctgtagtccccgctactccagagactgagacgggaggatcatttgagcccaggaggtcgaggctgcagtgaaccgtgattgcaccactgcacttcagcctggcgacagagtgggaccctgtctcaaaaggaatgaataaatacataaatattaactagtttggtgtagaattgaagttgaatccagggctcctgactccaagaacagttagattagttttcaagagagttctgtatttgtataaccctgacatttccagtcaagttggtctgcattgcttgttagtaatcagaaaagggaattggattgctaatcttttttttttctctttaacacagaaagtcccattacagaatcctcccattaagtgggctgaaggacataagggagtatttaatattgaagtgcaagctgtttcttctgtacacacccaggtaaggaatgtcaaggttaatcatgaaggtaaaggtgcagcggaggagcctttgaaggacaggccaataaaagatcagtgaaaatccttgtctacagataaataaaaaataaccctttagttctttgtggggacatgcaaacctctttaggtttcatttgtcattggaatagaaagaccttacaaaaccgccgagcacctaaaggaaagaacctagtatctgcactgttggtggagaaactttgcagggggacttgatttgaaactctcatctgctgttacttcttttccctctgtaactctgccactttgccagcttttaaaaagaaattccgtactctctcctttacctgccactgtctgagttctgcatctgctgagacctctctcttggcagtatgcttacctggtacgctgacctctgcttacagaacatgtcagagccaaaattatttcttctttagctaataattattgaaacgttcaacttcatgcaccacattctacaaagaagttcatagcctcggtctgaaacatcatgtcttagaccttctggtctgaaacgctggataagaggttctacccataaagagctattcgattgtgtttgtgaatccactggtgaacattgatggtataaaaccccatgaggcctgccttctcccttcgcaggacaaccacctggagaagttcttcaccctctgccactccctggagagccaggtgaccttccccatccgcgtgctggatcagaaaatcagcgagatggcgctggagcatgagctgaagctcagcatcatctgcctgaactcctcccgcctggagccgctcgtgctcttcctgcacctggtgctggacaagctcttccagctgtccgtgcagcccatggtcatcgctggccagacaggtatgaacctgcagggctgggctgggaggaggcaggagcaagcaagcattgccttctttaatgaaaaatgactttccagaaatccagagacaatgtgatcttcctttccactgatgatgtgtgctcaagggaggccaagtcttatgctattttttttttgagactctctgcatgttggaaagaaaaagaaacattaaaatagggttcttaatattatagctttttgtaaactttattaaatgattataggcagtctttaaaattccatttctggtaattgatgaatttattttaccttgaagatatttttgttttcttgactaacaggaaatggaacattttaaggtaagacaacctgtgttaaatggagggaaggaactctctacattgaaatgcaatgcaatcaatttttaaagttaaaacataaactcactattttaaagtgtatagttcattggtttttagtatagtcacaaggttgtgcaatgatcgctacaatctagttttataacattttcatcacctccaaataaaaccccatcactccctattcatccctccccctagaactcatccgttctctcttacagtctattttaaatgcttacttttaacaagttaacactaaatacaatgtgtacattttcccttagaaataatctcaaaagcttatcctggaggcatgaccagagtccagtggttctcctaactcttccagggtagactggctggtatagggcatctttatttgccaccattttcagctgtgcctatatagctctttgctttccagtccagcagacgtcttttgggtaccatccatatgcccagtactgtactaaaagttgtaggctttgtgacaataaccaagagcatctcagacctcagaggacttataatatggcaaagagtcagcagcacaggacaagactcctcaaagggacacagctaaattttgcagtggttgtggggagggtggtatcaaaggagagagtgagaaaacatccatctgggaggatgcaggaggtccacataaagagatggccttgaagaagggatagagtgaaaaccgacagaataggggcaatgagatgagtgcagcactgcagagaaccagaaaagtgtgggagtgtcaggaagaaagtcagtagcacagttggtggtggaacagaagcacgtgtggaagtgggctgggacaatgaagtgagacggcttttagagccagggaggggcatgtccccttaatctctcactctgctttgcaccctgatatgcatcttctgtggttccacagatcaaacgtcctgtgttggaggctaacttttcatccatgtagcagttgcctctccagctagattcttgcagagctctgccctccttcgattactttctgtgcccccgcatatgtggcacactgctttgtatgttccagctagttaatacagacttgttcaccagacaaaaatatttatatgttttgagcagcttctccatagcaagttgccaccttgtggtgtgaggaccacagggtgttggcataggcagaataagtggaggtggctagtctacaagcatttattcagaacctattctgtgtctctgcaatggaaagcacagtgggggcacaaaagatgtgagaaatgcacttcgcatgggaaggattccagctttcacagacagacagtttaccaccagacatggctggagaatcatgtaactcagtttcacttgagccctgtactgtgtggagtcagacggcttcatggaggaggtgggacttgtgctgagattcacagggtcggtatgattttgtggatgggagtgaggagggcttcctaggcgaggacaacagcatgagcaaagtctcagaggtaagagagcaggcatgatgggacaatacaatgactgcctcattttaagggatgtcgaactgagccaaaaagggtacaaggttagataagtatattggagccaaactatagaggcttagggcaccagaacaagaggttctatgcagtaaatcaaatgtgtatgggcccactgtgggaatgacttgatatgcagacatttttaggttaatctgtacaagaatcagggttgtgcagcacatctcaaatcatagtgtccacaacagtcacgtgagcatcttgtaaagatgcagaacctgattaatacactctctggggtggggcctgagattctgcatttcttagtagcaagcaggtgatagtggtcgtgtgtgtccgcagcccccactgagtagcatcagtttacaacctggcttagagaaggaggacgtctggacagtcttatgtctttgtcattaaaaaccatcaatgctattcagtggcaggaggaggaagttcaaaagagggaatgtggaggcatctgtggtactcagagccagcatgccagagctcaccaaaaccatctacccttcccaggcctagttaaattggtcagcggtcaggactcattgtcactgtcctggagaaacttccacctcaggctccttaaggaccagctgtgggactacccatttttctcttggttcctcagccaacttctcccagtttgccttcgagtccgtggtggccatcgccaacagtctgcacaacagcaaggacctgagcaaggaccagcatgggaggaactgcctgctggcttcctacgtgcactacgtcttccgcctgccagaggtgcaaagggatgtgcccaagtcaggtagagttgccctgagtgtgggactctggtgggcggggcaacaccacctccaccccactgcagtgtaatccaaaataaaacatcctatgctgggtgcaggggctcacatctgcaaccccagcactctaggaggctgagatggcaggatcgcttggagcagtggctcacatctgcaaccccagcactctaggaggctgagatggcaggatcgcttggagcagtggctcacatctgcaaccccagcactctaggaggctgagatggcaggatcgcttggagcagtggctcacatctgcaaccccagcactctaggaggctgagatggcaggatcgcttggagcagtggctcacatctgcaaccccagcactctaggaggctgagatggcaggatcgcttggagcagtggctcacatctgcaaccccagcactctaggaggctgagatggcaggatcgcttggagcagtggctcacatctgcaaccccagcactctaggaggctgagatggcaggatcgcttggagcagtggctcacatctgcaaccccagcactctaggaggctgagatggcaggatcacttggagcagtggctcacatctgcaaccccagcactctaggaggctgagatggcaggatcgcttggagcagtggctcacatctgcaaccccagcactctaggaggctgagatggcaggatcgcttggagcagtggctcacatctgcaaccccagcactctaggaggctgagatggcaggatcgcttggagcagtggctcacatctgcaaccccagcactctaggaggctgagatggcaggatcgcttggagcagtggctcacatctgcaaccccagcactctaggaggctgagatggcaggatcgcttggagcagtggctcacatctgcaaccccagcactctaggaggctgagatggcaggatcgcttggagccagaagttggagaccagcccagggaacataatgagactctgtctctacaaaaaatataaaaattagcagagcatggtggcacatacctttagtcccagctactcaggaagaagctgaggcaggaggatcatttaagcccaggagttggaggctgcagtgagctatgattgcaccactgcactccagcctgggaaacagagcgagatcccatctcttaaaacaaacaaacaaacaaacaaacaccctaaaattccattttcgttttcaggacaatacaaaacttacatgaatgctgaaattatgtgtttctttatagatctttcttcctccctccttgcctctttttatgctctaaacacttattttgtctgcccatttgataatccctcactggtctttacccacttgctaatttatgattcagctgagaatctcttttttaagatggagaagtggtgactgatgcctacgattctagtataataaaggaaataatatatatccaatggcagtggttcttaaactttttgttattaaaaaaaatcccttttcacatttccctcaaactgaactattgaaataatagtaatgcatttccccaactcttcttaattatttacataagtaataatcaagtagaacttcttgtcagcatgatataaaaattagtgtcagtgagttcacaaaattgcaggcccaaataaacatgacacttttgttggtctgtgcagcctcatttctagtaaatctgaaaatttgattgagtttttaaaaatactagtgatgtggctgggtgcggtggttcatgcctgtaatcaatcctagcactttgggaggccaaggtgagcagatcacttgagctcaggagttcaagaccagcctaggcaacgtgacaaaagcccatttctataaaaattacaaaaattagccagtcgtggtggcgggtgcctgtagtcccagctactcgggaagctgaggcaagaggattgcttgaacctgggaggcggaggttgcagtgagctgagatcatgccactgcactccagcctggaggacaaagtgagaccctgtcttaaaaaaaaaaaaaattaaatagtaatatctcatagatttccataaccgcttgtgaaaacatgtcaacatttaaagatgaaaaacagtgctgtatacatcatataccgtaatcctcacaaggttcagatgactctatggatttttgaatctgagaaaacctcactgcatgaattgtaaagttgtcatttaaatattgacaaattaaaaatatccacatttttagcttctcatgagaaatcagaagctctagcaaccctggggtccatttcccgatggcagtaatagactggagccagtagtaccccctgcctttgtaagaggcatgtgttggctgtttaccatgatctccaccactccctggtgccttatgccccatctacttctctccaaaagattgcctcctaccccaaccaggatttgttaagaagtctctaattccaaggcctaatccggtggcttttcatccaccctatccctcttcaattccttcttaaactcagtaagtaactctgttcccctgtctgttgacatgtctctgcctggtggggtgcaggcgctcccactgccctcctagaccctcggagctaccacacgtatggccgcacatcagctgctgctgtgagttcaaagctgctgcaggcccgggtgatgagcagcagtaacccagacctcgcggggacacactccgcagcagacgaggaagtgaagaacatcatgtcttcaaaggtaggaaagatgtcaaaccgtggaaggggacacaggcttttttattttttaactaaaacttggagaagtaacacagaagcaaccactactgctgcccaccatgctggtcggatgctttaatgctcagctttggagtgattaacgttctttagaacagattaagaccattctgacagatgcagcagcaagaccagcatctgaggatttgctgagaactacttagcttgggtagcaaagttttaaagcatcaggggtttagccacatggagtcatgtggctaaaccatgcattttattttcaaggaaaaaaaatagctttaacttttgatacctggaaaggttgcctttaatttagttttgtttctttaatacctacctcttacgttcattaacatccacagattgattatctcacaaaaaagtccaaaggaacagccgggcatggtggctcatgcctgtaatcctagcactttgggaggccgaggcgggcggattacttgaggccaagagttcaagaccagcctggccaacatggtgaaaccctgtctctactaaaaataaaaacattggccaagcacggtggctcacacctgtaatctcagcactttgggaggccgaggtgggtggatcacaaggtcaggagttcgagaccagcctggctgacatggtgaaaccccgtctctactaaaaatacaaaattagccaggcgtggtggcacatgcctgtaatcccagctattcaggaagctgaggcaggagaatcgcttcaacccaggaggcagaggttgcagtgagccaagattgtgccatttcactctagcctgggcaacaagagcaaaactctgtctcaaaaaaagatacaaaacattagttgggcatggtggcgggtccctgtaattctagctactcaggaggctgaggcaggagaatcacgtgaacacgggaggtggaggttgcagtgagccgagattgcaccactgcactccagcttgagctacaagagtgagactccgtctcaaaaaaaaaaaaaaaaaaaaaaaaatcccaaggagcaatgccaaattttacaagcatataaaaactgacatcctgagagggttgatggcttgccctatgttgtttttccctctatgaattctttatttttttcatggtaaagctttactttcagaacagttttagagttacggaattatatactctatacccagtctctcctttattaacattttacattcaaatggtacttttggcacaattagtgaaccaatattcatggaatattattcattaagttcatctttattcacaccttctcagtttttctctaatgtcctttttctgtcccaggatcccattctgaatgccatattacattttgcagtcttgcctccataggctcctcttgctggaaacaatttcttagactttctttgttcttcatgaccttgacagttttgaggagtaatggtcaagtattttgtagattgtctctcattaggaattttttaaagattatgatattattcacataccataaaattcacccttttttaaaagatggagtatacgatccaacagtctttaatctactcacaaagctaccacgatgaattcttagcctgaattttttctccaatgatctgtggcctcagggtggccgagctattagagtaatatcatttcccctgataaagagaaatcaaaatctctaggtttagacacagacacagtttcacccttacaaattccagccacttgacactgtgtggtgtgaggaaggaaatctgcaggccagggtttggggctgggcgccaatactgccccgctgtgtggccatgggaaagtcatgtaactgtgctgggcctcatgtcctcatctctgcagaggtcctggtccctgaatgaacttaagaaccatctaccctgggtcttttaaaaacactggatttggccgggcaccgtggctcatgccagtaatcccagcactttcggaggctgaggcgggcagatcacgaggtcaggagatcgagaccatcctggctaacacggtgaaaccccgtctctactaaaaatacaaaaaattagccgggcgtggtggcgggcgcctgtaatcccagctactcaggaggctgaggcaggagaatggcgtgaacccgggaggcggagcttgcagtaagccaagatcgtgccaccgcactccagcctgggcagcagagcgagactacgtctaaaaaaataaaaataaataaaaaataaatgaaaaaaccactggattcaccccctgagatgctgatgatctgtagtttgagccatcaggaattattcgtattctatcctttttgacttacaaaaatcagttcagggatgtgctggagtgagctcatacctgttcccaaaagctgattgcttagttttccagaattttttgagccagttttgaaacagacattgttaaaattaaatcgtataaacttaaaattaaataagttatattaaaaacaaaggtaatctgaatgcaatgtggtatgctagattgtatcctggaacagaaataggacatgagtgcaaaaactggtgaaatccgagtcgttcgtgtttagttaatagtaacatatcaatgttagtttcttagttttgacaaatgtaccttactataaaagatattaagagaaatgcaatgaaagtcatataagaaatactacctttgtaacttctctgtaaatctaataataactatacaacttatacttcaaaattaaaagttcactttaaaaaggtaaacctagtcccttcctaataatttcactatatgctacaatatctaagttcttccttctttacgtttactgtgtctgtgtgatggaaatattatataatggtttgctaccacactgcatttctatgacatcgtgttggtagattgaaatcagttatgatgaaagtatttgtggcacaaaaattggcaaatgctacaaattacccctacccccctgacaactggttgttaaacatttgccagcacaacacaactcagcctcatattgaaagcccctttcagtaataccactttctgatcacccaggaaagaagtggtctgcagctattactgacagccttgatctttctatttttctttaataaaatgaaaatattaaatttttatgtggacagggttagcaattttcgaattattttgttgcatggggagaaaatgtctgatagagcatgagcactccacttcccttcagaggtagtttttgacaatgtattggtgtttaggagacagcgtggtgcagtaccgtactaaaccacagagagacactgttcccacacattttttcctggcgtcccctgaagtcacagactcctagaagggactactcagcagcccagattcttaaatagtttttaactgtaggttgctacacacaaactattaacgggtgttgtctcaagagcaagtaaaattaggtataacttcactgtctttgctttgttttatatttacttatggcaattgttttacctttgtaaccaggaaaaaaaatatgtataaaaaaatgaattctgaggttgtgatttccagatgtctggcttacctttccatggttggttgactgttaagccatggtttgtgtattttagatcgccgatcgcaactgcagccgaatgtcttactattgctctggcagtagtgatgctccaagttcacctgcagccccaaggccagccagcaaaaaggtactgaagagagcaatgtgaggttcatcccaggataagaacagaaggatttcctcatgccctcacactgtgcttgggaatagtcaaagtgctcccctgcctgtccctgatgtgctaacacacacacaccccacacacacttttgcagccctgtcctttacgccacatttgaccacctaattgcccattaactcagtgtttctcccactttctcatgcatcagaattacctggaagccttgttaaaactcatcgctggaccctacctcctgagtttctgattcaatagatctgagctggaggctcaagaatttgcatttctaacaagttcccagctgatgctggtccagggaccacattttgagaaccactgcattggcctccttttagtagagggaaagctgggcacaagtcatccttgacaaaagtgaatggcaataattaggtatcatttgtttcaataccatataaactaatatgaaatgcttcctcataattcttcacaatcagccttacctatgagttcagaaactttaaaagctgttaaactgcttaccaggatttttaaagcaacaaaattccccaatcatagtcccagcctatgtggtctgagggatggagggaaaaaaaactgtctgccctaatttcctctcttctaggcactcaagaatctcaccattatagtagctacttaagtttttaatgtctttgaagacctgtattaaaatgtaaatatggcagggcacagtggttcatacctgtattcccagcactttcggaggccgaggtgggtggatcacctgaggtcaggagttcaagataagcctggccaacatggtgaaaccccctcctactaaagatacaaaaactagccgggcatgatggcaggcacctgtaatctcagctactcaggaggctgaggcaggagaatcacttgaacacgggaggcagaggctgcagtgagctgagatcgtgccactgcactccagcctgggcgacagaatgagactccatttcaaaaaaaaaaaaaaagaaaaaaagggtaaatatgcttattgcaaaggataacacaggaagccatttgcaagagctgacatcacagggaaatgtttattaaacaggcaaggagggaatgagcctccccaagtctccctttggactggatgagggaaagaccaagtgtgggagggccggggcctggtgctgtgcactttgcagtattccaggcaccatatgtctagtgagaggtaccaggatttaactataaaaggaaaagtgaaaaaagatatggttaggctaaaaacaaattagtccacttgctctaaaatttaatattaggctatcacaggccctatgcagtgactggttataggtattataccattttcctttcttaaaaaccattatttgcctacagcctgacttctttaacccatgtcctgtttggtttcgcagttgccatgttttgacttgaaatgaccagaatagagacattttatttcaaagggaagtttggccaatatgtttccttaataccttagcagacagagttttgctgcttggctattttatataacctccagagcaaggtgttcttgtaataatgctgcccagaaagcagcatgaattactttaagaagcagcttatccttgtctaatctcttcttgccataagaccctggcagacaaactgacctattttctagaggcgacctttgaagctgggggagcatgtctttcctacaatgagaagatcaaggtgtagtccagttataatatgtgcacagttagaccacctgctagactaaaactcaaccccacgcctctctcaagtgagacagcttcacttcagactcacaacagcaaacaaatgtgttaacgcatattaaaattattaaggtttgactaacctcacaaaacgaagtgaaaccagtcgataagctgaaacacctaagcattctccattcctcaccactaacccgcctgggatctaattggttaaaatacccaagcatgtatacagagattttccttttgtcatcttttagtttagctaagtagctctcaaattttaatgtacgcaagaattagtacattgggttgcatgcgtactggactctgtgggtaatttttttttttttttgaaacagagtctcacttactctgtcacccaggctggagtgccgtggtgcaatcttggctcactgcaacctctgcctcccaggtttaagtgattctcctgcctcagcctccagagtagctgggattacaaccgtgaaccaccacatctggctaatttttgtatttttagtatagatggggtttcaccatgttgaccaggctcgtctcaaactcctgacctcaagtaatctgcctcctcggcctcccaaagtgctaggattacaggcatgagtcaacacacctagccctctgtggataatttaaacgactgtcaagagcaatgtttgctgtaatcagtttttgctttaggtgttgactttaaaacttaatttgcaaataaggatatgatattagggtgttcaaatagctttagctttcttacctactttcttaccagaaaaaaaaaatgagtttatctacgtttattccaggttttgtgggcataagatgaaagaaaaccacagaaaattcccagacatcatttttggcattaattagggtgaccaactgttctcatttgcccaggactgagggagtccccaagatgtaaggttttctattttaggaccaggacattatcaggcacactgtaatggattgattgccctacctttagtcttgaacttcttcctcatcaaaatgattgtcaggaatatgaacacatagccagatatgctgtagaatggaaaaggtataagtcaccctgtgcactatttgctactgagcagtaggtgacttgaagggaagtgaagacgcaaagtggagctgggggactttccaagcatctggccctgggacatagacatttagatgttgtaagttaaggctgatactactatgcctttcagagcccaagatcctctcataaaccccaccgatcctgcttcccacaatgccatatgggcattataaaaacaaaaattgtccagtctcctagagagtttagacaccatctagacagtggtccctaaagtgtaaccctggaccagcagcagcagcagcagcagcagcagcacccaggaacttgttagaaatgcaaattcccaggctattgaatcagaatatctgggggtggggccccccagtctgtgtttcatcaggccctgcaggagattctgatacacagaggccgggcgtagtggctcacacccgtaatcccagcactttgggaggccaaggcgggtggattgcttgagctcaggagtttgagactaagtgggcagcatggcgaaaccccatctctaccaaaaaaaaagaaaaaagaaaaaactagctgggcttggtggtgcacgcctttagtcccagctacttgggactaaagtaggtgggaggattgcttgagccagggaagttgcagtgagcgagattacgccaccgcattccagcctgggcgacagagtgcagccctatctcaaaaaaaaaaaaagtttgagaactgctgccaccaaccaactgattttatggatgagaaaactgagggtgaagagaggaatggcttgcacatggtcacacagagagttttcagcaggacccaagaggaaagtaagacagtaccagttttaatggctacccagaatgtttcccccgtagaatagagtttcactcccaggctgagtccactccctcagatgtgtctgtcctgtgcagcactgaccccagccttctatgcaccgaaatgtcctccagtctcaggtgatctcagcactgactttgccatccaccacttactgcctagaacatctaagacacatgcttcaggaacgaacaagctattaaattggggggaataaaagaaaagaaaaaaagtgttggtgaataataatagcctttgtttcacagcctaatttttgtggttcttatttagcatttccatgaggagcttgcccttcagatggtggtcagcaccggaatggtgagagaaacagtcttcaagtatgcctggttcttctttgagcttctggtgagattcttgcgcgtttgtatctgtgctcaataggccaagagaagcacacagcagaaaggaattgacattttgttcactgagttgcccctgctgaaaacctggggtggtttcttgaaatctaataatctctcacccctcccatccttcttccactaaattgtgttgcttctaccatgaaaatctatcgccgtcctgtgagttctcatcaccttcaccactctccacctggccacacaccatcatctctcatgtgcctctcgcagtgacatcctctttttcctgcctgtatccatttttgctcttggcccacccattctgcacatggcagccaatactaaacagagaatgtcacgctccttttaaaaaccgatcgatgattttcactgcactgagaagaaagcacaaatttttatcatgacctaaaaagcccttgtatgattctgttgttttcctccctctctaacctcatctcacgccacattcccccatcattcagccacatggtcctcttttggtgctttgaagatgccaaggccattttggcctcacagccttttccagattctcttcctgctccctaactttcacctccgcacccccaacacacacagtttctattcttctctgtagatttcagcttcagtggaaccatccccaagaggccttttctgaccacctaatactgtaatatatcttcctctattatcctccttctgagcaccctatttatttctttcctagtggttatcacaatttctaattgttttttctgtctcagcggttagattttcaggatttgggtctctcttgtgtattatcccatctctagcctcagcacactgcttggtaccatgcaaggcccaattaatatctgttggaaaacagaatgaaatttgtatatctgtttatcctaaaacttctaccattactcgagcagaaaagcaaaaggtatagccataataccttaattttaaaataaggggaataatagtgataactatttttttgtttaattattaatggaagcaaaaggattttcccatagaggcactaaaaataaacattttctcaatgttgataaacagagatgcataatgagatgatgttgaatgaaagaggtctaaagacatagacaccaactatataaaaatatatatgcaaacagttcagaggatttggagtaggttgagatttagtgataatgttagctttatattcattgggttctttcccctgtcccattaagtgaatctttttttttttttttttttttttaaagagagtctaggctgggtgtggtggctcacacttgtaatcctagcactttgggaggctgaggcaggcaggtcacttgaagtcaagagttcgagaccagcctggccaacgtgacaaaacccatccctactaaaaatacaaaaattagccgggtgtggtggcgggtgcctgtaatcccatctactcaggaggctgaggcaggagaattgcttgaacctgggaggcagaggcagcagtgagctgagattgcgccattgcactgcagcctgggcaaaaagagcaaaactccatctaaaaaaaaaaaaaaaagagagagggactaaagagatgggaggggttccacctaagctctagtttttgtatgtaagttgaagcccaagaaaaagggagaaatgctgaacaataggacacagagaacaaagggcaaaggaaacaaatgaaccatccactggggaggaaataggaagcaatgtggaatagagttcagaagaagtcaggttcatgccacagaaacacacccaggattcaaatcccatgaagttttgcaaagtcccaacctctgttttgagaagggtcccaaagcatggtcccaaatccttgccacagaaccacctggaggtgcttagtaaaaataaagcagagattctttctcaaagcactaaaattaggaggctggaggccagcattgtgcatttacctgtcttctcaggtgacttctaagcctgttaatgatccactggtctacaccacctctgttctgtgaatcctatacagagctacaggtcttttggaatttgtactcagacaacaccagaatttttttttcattccaaaagccgagctaattaaggtggtggctgcagctcacaagtcttggggcaagagcattaacaatgagacatgagctccatgctctggcaggaaagggactgggccataagacccattcccctcttgtttcttgaggcatgagaagtatcaaaaccgtcaccccatgccctttatatcctgcttctatttacacatcccacccaccatcatgtctctccataaagaagattcactcagcctagctctgcaaaaatgaaaaaattacctgggtgtggtaacatgtgcttgtagtctcagttactcagcaggctgaggcaggagcgtcactggagcctaggagttcaaggctgcagtgagccttgatcatgccattgcactccagcctgggcaacagattgagaccctgtctcaaaaaaaaaaaaaaaaaaaaaaaaaaaaagaagaagaagaagaagattcacttgagtcataatccagctatggataattcatacaaataattcattcccaatgcggaattcagcattgcttattctgagtggttccatgtggcatcttagagctctctttccaaaggaagtttgcattctctgcaggtgtaatgatgtctctgttcttcacagaatcccaataatagttggcataccaatagttggcataccaatgggagaaagaataatcacatcaaaactactgagcatcttactatatatgtgccaggcagtgttttaagcattttaaagcatcatctaatgtaatcattatgcaatcttgaggcaggaggaacttttattatcccaaatttacagatggggttggaggaagggtggtggccataaagagagtctccaagtcagccaaatgcttcagcagtaccacttcactgcccctaactgcttttggccttgcacatttatttactagggcttcgttggcccaggagagaaagcataagctaaagcacatggcccatcttacctctaggaagtcccttatggtaaacagatgaagttttttgggaagaaagcccctgctgatctaagcatattgcaggggtttgtcaacatgcagatcacccaagacaccagttctaccagcagcctaaaacctaagtctgtcaggttctggcaggacagagtttccgttgcccaaaagggttaactgaaaagcattgatcaaaaggactctgctcagcatgtatgggaggttcaggggccaatgaggattggtgagagcccccagggtacagcagctggcagaagcctttctctatgctagctctaaagaatcaagagtatagcagagtaactggggcctagaaaaatctggaggcagatgagacaatcttagaaaaggagcctggggccttagaaaaatgttgccactaccaggacctcactgcagcagggatgagggcagtggaagtgagtaactacctgggcctctctgttctcccacgtaatgatccccttgtttgtgctcctgttggccaactccaactggaagccaaaggttaagggggcctgagtgatgtggtccctcgagacccccttcccagcattcagagacagacagagaaggacaagaaatccatcagggagctggggtaggggcaaatggaaactatcatcccccagccagaactttgcaaggaaattgatctcagactcagacaaggtgcccaattcttcatacattgtttatgcatttgcctgaccaatgcccaggaagttatttgaaaaccaaaacagttttgttttgtttttttccaagaagcttgagaaagacaacagcttccttggccttagccaacaacctgggcaatttaacaccctctagttgtgtcagtgcccaagcgctaatgaacaaccactttggcattagagctgttaaacacaatgcttgggcgactttcacacttgctaatgaataaaatccctgtgcttctagaaactgctgagccagaccttggagaaatagagataaatgggtgacctagtttactcactcaggacatgaagttccacattaaggggttctttagaggtacccttactttaaatgggccacaaaggcccatatagggggaaagatttctgtgcctcgccccactcaacagggccaggcctccactagtgtttctactggatgttcttctctggagatctggaggacacagtagctggcaagctgctgacagtctggaaagaggccattggttggaagtatggtattgtgagaattatgtatttggttgtaggatggccaaactcagcagacaggagccaaatacagcagtgagttctgaaagccttagtgctgggatggttagcctgcccagaatcaggattggcattgcccaaaacaaagaggccttatcttcttaagtcctttgttaggagcatagtgagagagaggcttttttcggacaaaaatgggtccagttcccacccttcattcgggtcttctcaccaggtgcatgcggccttgtgggatatgaagccatctctgtgtcccaaaccaaagaggatgccgccatgaggagaaaccatggtttctctactgagctttagggtttgatgtccttaggtcttccctgagctggccatggcgttgtctgaaaacatgaaacacataaagcctgtgtctctggttttttcttattttgccttccctttgttttttctgtttgtttccatgctaacaaaaattgccagtgctgcatgcatccttagaaactgaattctgctgttagtgtattaacgttctctcatgtagctcctgggagtggaagtcccctcttcttccagtctcaacacagagggcaaatgtgggtggttcaacttccagtgccattagtagtagtagtagtagtagtagtagtagtagtattgcagtggctgtctgactaatctagacgcatacatgaaaacgttttcagagtgtagggacccaaccacaagaccttctagtcttccccatgttcctaatagtgtaagcaacttccaacaaggataagactcaccctcagatggtgacaagggggcccatattgacctgtgaatctcctggccccaagaagatgtccaaaaaataagcatgatcttgatttaaaattgtggtaggcattgagatagtattattctagtcataatgcagacagtcaccaattgacacaaggatatctatatatagatacgatatgtatatgtatgtatatccatatagatatatctgtatataaatatctttctgtcagttgacgaattgtttgcattatatatgtaaccacagtatacaccagtttgtgtcaattggtgacttgtattgacacaaagatatctatatagagatactagatatagatagataatctgtatatagatatttttgtgtcatttggtgactgtctgcattatgtaactaaaaattagacttatggaactcaaaatttcccctagaggtaatgttttccctggaggcaatgttctaaatagtggttctgtttccagctggccaacatttcctgctcaatatataatatagctaaaatttataggagcagaagataactgctggaaactatagaactgtttctggaaaaactgtgctccctcgagaaacactgaaactcaagataggaggaacatttctcccacgttctccttactgtagtttcaggaacagaaaagactttagttcgcatcaagaaccttgtgataaactgttcctttctgagtcatgtgttctgtcctatgatagaggacacctagctggttacaggagcccagctcaggtctgccttccaggatgtaggcagttgagaacactgtagctaaagaattaagctcctggctttgtcagcagcaagaagggagcctctgacttggggtcaaaaagaggacacccttcccacctcccgccaccatggtaaccattggtgtgtctgcagcattttagtccagagcttgctcgggcaccaccagcacagataaagtgtcagaaaatccattgttagagagcatttctgtgagtctttcccccttttctgcattgtacaagcaggtcaccaatctccatgttgacatttcctccatccccctccgcaggtgaaaagcatggcccagcacgtacataacatggacaaacgggacagttttcggaggactcgtttttctgaccgtttcatggatgacataactactattgttaatgtggtcacctcggaaattgcagcccttttagtaaaaccacagaaggtaactgtattttactctttattttctaaattgtttacctggaacatatattactttcataatcagagaaaaataagcatcattttaaaacaataattaaaatataactgtaatgacagttaaacgcagtatgttatactggactggaccctgatgtggggctggaaaattgttataaacaaattacacacatgaggccaggggttcgagacctgcctggccaacatggtgacatggtgagaccctgtctctactaaaaatataaaaattagctgagcatggttgtgcatatctgtaatcccagcaactgggaggcagaagcaagagaactgcttgaacctgggagacagaggttgcagtgagccgagatggtgccacagcactccagcctgggtgacagagtgagactctgtctcaaaaaaaaaaaaaaaaagaaattgcaatatggactgtggtttaaatgatcatatcaggctgggtgcagtggctcacacctgtaatcccagcactttgggaggcaagggtggtcagatcacttgaggtcaggcattcgagaccagcctggccaacatgttgaaaccccgtctctactaaaaatatggaaaattagccgggtgtagtggcacgtacctgtaatcccagcttctcgggaggctgaggtggaagaatcgcttgagcccaggaggcggaggttgcagtgagccgagatggtaccacagcactccagcctgggtgacagagtgagactccatctaaaagaaaaatgtagatatgaaagataatatttttgctcttaggaaatacaccttgaagtgttatggggtaaatgggcatgatatttgcaacccattctcaaatggttcagaaaaaaatgtttttatgttcatagaatgataaaacaaatgtagcaaaatgtcaagtattgataagcttcgttaaagggtatacagtagttctttgtactattcttgcaccttttctgtaagtttaaaattgtttcagaataaaagctaaaacatatataaaatggaataaatcaaatgtttaaaaggcagctacaaaaatcttaggaagcaatgtttattattaatcgctttgtcgttattgagaatgtgcatagtaccaagtgctcaggagattttcattcggttattcctcatggcaaactttgttggaacagcatggtatctccacattggcaggtgtgagaataaggcacagtgaggttgataaattttccaaaagtcacacacagccagcagtaaagccaagactggagattttagacccagatactgagtcacgtaaggcacccaggaggagtggccatgtggagaatgcggagagagttcgaggacctctcagcggcacggtagcaacctctttatcaggtccccatccatcccagtgacttgactggtcagcatggcctgaatttgcaaattgcatgttaacaaaagcaaaatagtttcaaaccatatttttaatagtgtcaaaggaaattgatttgtcattctgagaataaaggacataaacatgaaaaactgaatcccagattgctctgaagcactgtaaaatccctcataaacaggagcactgagaaataatacaaattaaaaattttaaaaataggcgtagcttattaattgggattcatggaggaatttaccctacggagtgaatacaccctgcggagtatgactctgacctctcttaggctggaaatgctgcctaattgaggaataaatttcttaggtaaaaactaattcttttatcctgattggattttctgtaataatccttaaaaattaagaaactgtctcattgaaaacagtaagtatttttcaagtcagtttgccaaaaaaaaagaaaatagttacaaaaaaaaaagttaccaggatataaaaaaaagtaggatccaacatagtatatagagaatgaggttaattatacacatataaatatgcatgtagaaaaaaaagtgactggaaggaaatgcacctaaatattaacagtgcacgaataattacttgattcaacctcacagtcatggctttagttaaaggagactcaactacttcgcccagtgccacccagaaggacagtggctgaaataataggacctgtctctcccaatgttcccaccagtgacctggaagttcaaatccagagtgtcccacaaaatgatttgggtgtttgtttgtttttaaggaaaatgaacaggcggaaaagatgaacatcagcctggctttcttcttgtatgaccttctctccctcatggatcggggctttgtgtttaacctcatcagacattattgcagccaggtgagtgtcccccccacccccacccccgagcgagccacttggttccttctcatataatgtgatgttcgttgccatggcacgctgtcttcttcattactgagttggcatgaatcctacacatcctgtgttttgcagcacgtccctcatgtctgtgccatggacattcctcagacatgctggtttaccttgattcctggagcatttaccgacagtgtagaagggtcaacagattcatctgtgggaattaaaatttgtgatatgatctgaatcttcaatttgacattcaacagaaaattaacatggctatacagtgctttcagtctttgacaagtccttgcgctcccagtctgaggtctcttttcacatattagggtaattaattaaattgctgttgtgatgctccgacttgaaagaacctttttaaagtgttcttaaataaaatcattcaaagagatttaatttcactgagcacatagcaaatatttcataaaccaagtgcatctatcagtgccatccccccagatttttaaatggaattattcatgtgctgtctccctcaaactaccttaacaatagtaatataaatagcagttattgttgctgctcctctccttccatatccctaatctagccactagtaccatcattactgctactactaccaccagccaccaccattctcattagtcccatgcccactatcaccaccttctccaccatcaccacctcccaccacctccaccacctccaccatcaccaccacctccaccatcaccaccaccacctccaccatcaccacctccttcaccatcaccatcaccaccacctccaccatcaccaccaccacctccaccaccaccagcatcttcaccatcaccaccacctccaccatcaccaccaccaccacctccaccatcaccacctccttcaccatcaccatcaccaccacctccactatcaccaccacctccaccatcaccaccacctccaccatcaccaccacctccaccatcaccaccacttccttcaccaccaccaccatcttcaccgtcaccaccacctccaccaccaccacctcctccaccaccaccacctcctccaccatcaccacctccttcaccatcaccatcaccaccacctccaccatcaccaccaccacctccaccatcaccaccacctccaccaccaccagcatcttcaccatcaccaccacccacctccttcaccatcaccaccacctccaccatcaccaccaccacctccaccatcaccaccacctccaccaccaccagcatcttcaccatcaccaccaccacctccaccatcaccaccacctccaccatcaccaccaccacctccaccaccatcaccaccacctccaccatcaccaccacctccaccaccaccagcatcttcaccatcaccaccacctccaccaccaccaccacctccaccatcaccaccaccacctccaccaccaccagcatcttcaccatcaccaccacctccaccaccaccaccacctccaccatcaccaccacctccaccatcaccaccacctccaccatcaccatcaccaccacctccaccatcaccacctcctccaccatcaccaccacctccaccaccaccacctcccccactaccaacagctccttcaccatcaccacaacatccaccaccaccatcaccaccaccaccaccacctcctccaccatcaccacctcctccaccaccaccaccattagctccaccatgaccacctccttcacctccaccatcacttcttccaccatcatcattgtcaccatcatcaccaccaccacctccaccaccatcaccacctctcccatcaccaccacgttctctgtggttagtcacttagtgactttagataagtttttccaattttatgggtcttaatttcctcagttttaaaataagaagggggggttgagagatttgagggctgatcaacgaaaaggataggaccataaaaagcagtgacatacaagcttcattgagcagcacttggacagggttacataagagcggaagcccctcccagcatgagaacagccataggcctgcagtgaggaggggaccatccagaggagcaggggaactcccaggggagaggaggattagggcagaagcttatagatctgggtgaggctgctccacagcacagtagggagtctctgggtcagagagctccaagggctgtagcagcttagggccctgtatctgcaaggctctatcttatcattaggaaacagctgtccatcgagattttatggggtctgcaaaggaggcaggcactaaatggatgaaaatctgcttatatgagctatttttgttaatgactgggcatggtaaaatttgagttaggtatgagccaagggatcagcaccagtcgacagtgaagaaataaacaaccgaggggccaatacacagaaacaatctttgacttgtttacataacacctctcctccaaaaaaagaaaaagacatgacttttctaaaggaagtcctgtctacagccataccaccctgaacgcacgcagtctcatctaagggaagtcctgataaggaagcagaataataaaaaagaatcctaaggaaacatcagaagtccccaagcatccccatcccatgcaccctgacccctgccctgcagcggatcttctgtcccaggacccaccagaatagaatggcagagggacacttcactcctccttgccctccctcttcagtatttaggattccaggttagtctgttttcaaaactttaagttgagtgtatgaaagataccctagatcaccactgcagacccaggcttagctactcacatgcaggctatcttcattcccgacagggaaataaggcaacccaaggtagatatctgccttccctgcaaaactcatgtttttattttctctttctctttcctttcttttctcttgctcactatctttctccttaaattcttcccttttcttttagttaccatttctttttttgtttctctccttgactcaaatgccaaagatccctagaccaggagtcaagaagcctgcatgctgattcctgggacaccattaattacttctgtgattgggagcatcagcctttgaggcattcatttcctcatctgcaaaaaaactaggctggattagatttatccactgattctgtggtctgtgtctgccagtgacatccacggatgttacttagcaccattagtggcactcaggcctcagaaggtcactgacccccattcgtggtgatttaattcattgatcccagctctctagatacaggatgaacttcataccttaagcaagttgtattcttacaaagtcgtctgactttatcattttgcataacctattatgttttctgccatctaaagattttgtggcaatggatataaccttagtcttttttaatagtcactaaaaatagacaaatccatttcctcaattactgtctgtcacttacaatgtgccactaagcaaacacccatcccttgggtaggggcattgtgggtcttgacctttgggaaggaagtttttggaatgcaccttactcctcttttcaaaacatcactcaaattgtttttgaaatgtctattttttttcttttgagatggagtcttactctgttgcccaggccagagtgcagtggcacaattttggctcactgcaaactccgcctcacaggttcaagcgattctccttcctcaccctcccgagtagctgggattacaggtgtgtggcaccactccccgctaatttttgcatttttagtagagacagggtttcaccatgttggccagactggtcttgaactctggcctcaagtgatctgcctgcctctgcctcccgaagtgctgggattacaggtgtgagccaccacacccagcctgaaatgtctgtcttgaatgatgtctcaagggacctatgaaagatacccatagtggggccttcttttaagtgccaatgtgttgtgggttcaagttccgatagccggcttgacccgacacctgttaatgagtaacctaagtgacaggcacatgaccaagttctaatcccttcaatgtgctggtggctccactggtccaaagtcagccaggagtgcacatcgaaaggttatgggatctggtaactgtgcttacatagaagtcatatgttttggttttaaaataatatataatggcatttacttattttaagtggatgtctaactatgaattaattctgtaggcaatatgtcccacaacacattggcttcttgtaaaatggctgaaaatatgtgttcatttaaattatattgtttagtctgtaatcccagcactttgggaggccaaggcgggaggatcacctgaggccaggagttcgagaccagcttggccaatatggttaaaccccatctctactaaaaatacaaaaaattagctgggcatgttgatgtgcacctgtaatcccagctactcgggaggctgaggcaagagaatcgcttgaacctgggagatgaaggttgcagtgagccgagatcatgccactgcactccagttcaacagagcaagactctgtatctctctctctctctctctctctctctctctctctatatatatatatatatatatatacatatatatatatgtgtatatatatatgtgtatatatatatatgtatatatatatatatgtgtatatatatatatgtgtatatatatatatatatagtttaaaaaacaaactactcttgaagtgagtgaagaggaggcatgtctatcacaaggatgatgcttcatatttctgtgctggggtggggggtgataatgatgaaatattgaggagctcaaggtgcatcagcgccccttccttcccctattttgcctttagaggagctgcctctgagtctgggtctttcagttgttcagcttgcctgggggaagcaaggggtctcttccagacagtcacctttttctgcttttcattgcttgcttcatggtttattttttaaaggaagatttttcctaaaaactcttctagctttctttctctttcttctccatttcctcctctctcagtctgggacaagctccttgagttttttgcaggtactatgtactttgctaaacagtttgatgcctttctctagggaactggttctacaactttccaatggggcctttaattagaaactacgagagaacacttgtagtataaaagtcatctagtcatattctattagtttcatacaggctcatatgaggtcaactcctttcatttagtttctcgaacatagtagagtttttgtaaaattaattatgttacggtgaagatgtacctcaagattttcagcacaggcttcccatggtattaaagatttgataaagtggaaatcgggataagaatcctcattctggacagctactaggctagaatcactaaggggaacagtaatgaatgaaaatttattagacctctctgtaatgcagaatttaccatctgttgcactatcccattagtttttattaaattgattgccttaacctggagagaaaggatatttttgtgtctgccaacctcaactccacttaccttgtaataaatgtttcattcctcttttcatttttcttcccagctgtcagccaagctcagtaaccttccaacgctcatttccatgaggctagagttcctgagaatcctctgtagccatgagcattacctcaatctgaaccttttttttatgaatgctgatactgctccaacatctccttgtccttccatatcttcccaggtaataaaagaattatttaactaaaagaattattcaagctatttcatttaactagctcagtttaatcatgtatttcctataaaggttagtcttattaatttgacaaaaaatcaaacaattcaaaccagatcaagtatgctaccctgaagttacaccactagctaagaattaacaatctaagtaattggtttctccccaggctcaaggctccctgatcaggttaagtaaagccaagaatccaataagccctatgaaatttagaaactcatagaaaagtctcaaatcttcctttgtctgacattagccaattgttatattatgcaaatagaggattccaaagtaaataagttttggaaaccatgtattcaccaggtttctttgcagcaggccctctaagaggttttaacttgttcatgtcaattgcaaatgcacgagaagcagaagaggaaatgggaggaggtgtgcatgataagcagtgattccccaaatgatttaacatggaaaccccaccccacctcatacattttttgaaatgttactctggaataactttaagaacatgctgtttgatagtcacattccatttatagggaacacatcagtagctcagagcatcaggcaaaatttctcattattaggttatatttctgttgcatattccttgatactagtacaaaagtgaaggcttgtcttactaattgaaaaaaaaatcttagccatatatgccatatggcatgatccagatattagctacatgaccatcttactgtgaacagggaaagatctgactcacaagcagcaattcaaaatgtataaactttttgctccatcctgcccagcagcttaagtcctaaaacttccctggactaagcttaccctaggttctttcccaccttccccttctgactgccccagggagtggccaaacccaggggccaggctcacaaaaccatgaaggatttctaaagacactttagatgctcttaatgaaatataaagtgtgctcccaggatacaaatacaggacaggaattactgaggaccggtaaatctaatacttccctccctgacatcacttgtagttccaggccagcaaaagtctgacaatgtgcttaagccaaattcagaagtgtagctgaggccgggcacggtggctcacatttgtaatcccagcatcttcggaggccaaagggagtggaatacttgaggcaggagttaccagcctgaccaacatgatgaaaactcatatctactaaaaatacaaaaatgcatcaggtgtggtagtgtgactgtaatcccagctacttgggacgctgaggcatgagaattgcttgaacccgggagagggaggttgcagtgagctgagaccatgccactgcaatccagcctgggtaacagagtgacactctgtctttcaaaaaaaaaaaaaaaaaaaaaagaaggtacctgagtaagcagggccttaaacaaagggggcatttggttacagaggaattgcctgttcccagccccaggactgggtgaggttcttatttctctgtccaacttttatgctaggatttttatcttcagcttttgatttcaggtgggaaagggagcgtcattcatttttcaacagacccggggtgctttattttcatctttcccgctgggcagtcttctctctgtgggtatgggaaagtgcagtaaccactctgtgcctcagtttccttgtccgccttatctggcaccagagtacctacctcactggggagggctcacgaagcctggctggggcgaggactcagtaaacactggccatcgctattttcattccagttcttgtggctcataaaatggctccttacgtttctgtagaactcaagctcctgctccagcttccaggaccagaagatcgccagcatgttcgatctgacttccgagtaccgccagcagcacttcctcaccgggctcctcttcacagaactggctgctgccctggatgccgaaggggaagggtatgtttctggcatttaaaatggaagatgaagccaaaaaaacagatgttctttaataaaatttgcagtctagcttctcacacttggtaaaaaactctactgtagttgaccagttctgaggagtagaaacatctgtcttgagaatatggtacccataagcacaaggcacaagaaaggcctttcttgtgtagaaaggcaccagggatgggtaagaactacaaaatgacttttcttggtcaactatttcagtggaatttaccagttctgctatagcaggtttcccaaggatgctttgattagtgaactccctaggagcaaagccatttttaacaaaggggatagcatgcagaggcaaccacaagatgtcacttggttcaaagctgatgaaggaaataatggctgctgagaaggcagctgtcccatgcccagattaggtttcttgcagacagtgcttctcaggccaagagacaccacacatccagggcttctgaatccttttacctcttatctatctgattactcagggacatgtggcagtatctagcctagaagtcaacagacagagaggtagaccacccccttctttccttctctccctatgctccgtgagctcatggagtcagaaacccacagcctatctgattggactgaaaaagataatgccttctaaaatattattcattccgttcaacaattattgaatgccttccatgggacagacacagttaggtgttagagtacatcagagatatatcagtgcacaaaacagacaaaattcgctgcccctcaagagctcaccatccagggactcagattcaaagatgattaggattgcaaagtagttgagattcaacacttctggtgtttagattaggcatacagaattgcaggaacttgcccactattccataacagagaacgaaatctaaagccatggtcttcccagtcccttcccaggacccactctcctataccaaaccatctccctgcacagggaacctgttcccatgactcctatgctaaagaggtttccagaataatgtttgctaattaatggtagcattgctgtatgttatggatggatttttatctaaatggaatttctcaagttctctcaaagtgcttacaatttagtgaaggaaacaggaggttcctgcatgaaacaaatacaggagcacatcgagttcgtgcaactgcaacagtcacatgtgtcccaagctatgtacccaggctgacaccgctgaagtgactctatgtctgcgtctcctggcaggatagtgtggggaatctcatgcttttagctctcaattctgcctccttccagataaactggcctgagtatatcctttgagaacttcactttccatggcttcaattctatcttctcttctcaactctaactaaatttctcccaattatctcagtagaatgttctaccctacaactaacataaatttccacagcaacaaaaagtgcaccgaacacttatgctaataagtaagatactgagaagaaagtttgaacacaaagaaaattgccttcatgcacaaacatgtacatacattttcttagttgtcctttaatagcagtactttaagtgatttctagaaacatctttagtatttacaatagcgtagtttctattttctattttcattctagctggaaacagccatgacattctgttctggattccttgtaaaattgttgctgttatattactagcaacaaggtagagtatattcagagataatcatgtaattatgtttaatcaggtagatacattcttcaaacacacacacacacacacacacacacgcacacacgcgcgtgcacatgcacacacacagtaccctttctcccccaaaagagtaattaacagtgtaactcctttggcaacacagtaatccctgattgctgggttgtcagttactctcctggaaagtcattagatacactgtcacaacttcatcatgtaagctaaaacctcagaaaaatgtcatgcttcaacaatacttcctattgatcagcacttcctttttttttttcttttgcttccaagacagttggtagacttgccaacacctgtacatccatggggcaagggccagaaggacgcatctcagtacctgaacccctagggagctacagctccagtttccactgggtttcccttggatctctgacacctgggtatatccacaagtgtctatgcatcgttaaatccacagtgtttttcaagcatttagaaattgtctatcatctttgtgttaagccagcaaattgcaatgcctaattcaaaacacaacccattgccgggaccacagactaagaacaagaaaaacttttgaaatgcaatttacaattatcttactttagccacagtgcaagagtctgagtcatttaaaattttggttaatattttctatataacgttgaattctgatgtagccttattttgtttgaaagaaaaaaatgtatatatatgtatatattttttaaatctggattctttttttattattatcatactttaagttctagggtacatgtatacaacatgcaggtttgttacatatgtatatatgcgccatgttggtgtgctgcacccattaactcgtcatttacattaggtatatctcctaatgctgtccctccccactccccccaccccatgacagtccccggtgtgtgatgttcccacctatgagtgagaacatgcggtgtttggttttctgtccttgcgatagtttgctgagaatgacggttttcagcttcatccatgtccctacaaaggacatgaactcatccttttttatggctgcatagtattccatggtgtatatgtgccacattttcttaatccagtctaccattgatggacatttgggttggttccaagtctttgctattgtgaatagtgccgcaataaaaggattataaatcatgctgctataaagacatatgcacacatatgtttattgcggcaagatgtatatttttaaaattgaacatctatgactaggttccagatactccactatatattttatttactttttattatagtataatttatataaagaacctgaatcctaagtgtaaagtgcgattaatatttcctgtgaatatatttgagtaaccaccagtcagataaaaaatataatattccattatcctctctcagttacaggcccccctcaagtaaccactattctgactcttattattagaaattaatactgcctgttgttgaatttcatagtcttttgctgaatgttgtgactgtgacatcctttagtgtggtcgcatgtgtcagtattcattttttttcaactgtatgtcatattcctttgtctactataatttctcttctgtaaattgacatttgggctgctttctatttgtgggtattgggtattatgaaaacagctgccgtgaacatgcctgtgcatggttttgggtggacgttagaactcatttctttggggctataaatacagcctattttttattttaatatactgctcttgaatagtttaataaatatgtgtacatggtcttaacaaaatgtcaaaagaatatactctgagctaggaaaagaagagcaaacaagtcaaagcaggaagatggcagggaataacaaaggtgatagccaaaataaatgaaataaagaatagaaaaacaatcacggaaatccgcaagatgaaaagcttgttatttgaaaagagcaacaaaattcaccaatctttagctgagctgaccaagaaaaaaggaagaagactcaattactaaaatcataattgaaagattcaacacaatcatatcacaagagaccttacagaaataaaaaggattataaaagaatacgatgaacaattgaaagccatcaaattgataacctagattaaatggataaattccttaaaaggtacaaagtactaaaattgactccaagaagatatagaaaatccaaatagacctacagaagtaaaaagattgagttagtaatcaaacttcccacatacacctactatgtacccacacaaattaaaaatttaggctgggcgcagtggctcatacctgtaatcccagcactttgggtggccaaggcgagtggatcacctgaggtcaagagttcaagaccagcctggccaaggtgatgaaaccccgtctctactaaaaatacaaaaattagctgggtgtggtggcgggaacctgtaatcccatctactcgggaggctgaggcagaagaatcatttgagactggaaggcagaggttgcagtgagccaagatcatgccaatgcactccagcctgggcaacaagagcaaaactccatcacaaataataataataataataatatattttaaaatttaaaacttcctacaataaaagctcaaacctggggggctttactgatgaattctaccaaatatttttaaaagaattaattctaattttttaccaacttccagtcttctcttccaacgaatggaagaggtggaatacttccccacttgttctatgaagctagcattaccctatactaaaccagacaaagacatcatgagaaaactacaggccagtatctgatgaatatagatgtaagaccctcaacaaacactagcaaactgaatccaacagcatataaaaaggattatacaccatggctaagtaggatttatctcaggaatgcaagataggctgcatacctgaaaatcaattgttgtaccatattaataaaataaaggacaaaacccatacaatcatcttagtagatgcaaagaaaagcatttaataaaatctaataacgcttcctgataaaaacactcaacaaaccttttaggaaataagagaacttcctcaacttgacttaagggcctctatgaaaaatccacagctaatgtgacacttattagtgaaaaacagtgctttatccctaagattaggaacaagacaaaaatgtctacccttgccacttctattcaacatattaggagttctatctagggcaattaggcaaaaaaataaaacaaaagacatctaggccaggcgtggtggctcacgcctgtaatcccagcactttgggaggccaaagtggacagatcgctttgagcccaggagactgagaacaccctgagcaacatggcaaaacgccatctctacaagaaatacaaaaattagctgggcattggtggcttgtgtttgtagtcccagctacttgggaggttgaggctggagaattgcttgatcccagaaagcggaggttgtagtgagctgagatcacgctactgcactccagcctgggccacagagtaagaccctgtctcaaaaaaaaaaaaaaaaagaaaaagaagaaaagaaaagaaagcatttaaattggaaaagaagtaaaactatctctattcataggtggcataatcttgtttatagaaaaccataaggaatccacaaaaaactccattacaactaataaatgaattcagcagtgttgcatggtataagatcaacatacaagaatcaattgtgtttctatacacttacgatgagcaatctgaaaatgaaattaagaaaacaatttcatataaaatagcatcacaaagaaaaaatatttaggaataaatgtaacaaaagaaacacaagagttatacactaaaaatgacaaaacactgttgaaagaaagatataaataaatggaggatatcatatgttcatgaatcagaagacttattattaaaatagcaatactccccaaattgatccatagattaaatgcagttcttctcagaattctagcttgcttttttttttttttggcagaaattagcaaactgatcctaaaattcgtgtggaaattcaagggacccagtatagccaaaacaaccttgaaaaacaagaacaaaattggaggactcacacttcccaatttcaaaacttactacaaagcaaaagtagtcaagactatggggttctgacatatgatagacatatagatcaatgaaattgggttaagagtccaaaaataaatcttcatatttatagtcaattgatttttgacaagagtgccaaaacaattcaatgggggaaaatagaattttcaataaatggtgttgggacaactgggtatccacactcaaaagaatgaagttggaccctatattacactgtatacaaaaactaactcaaatagatcaaagacctaaatgtaagagctaaaactataaaattgttacataaaattatagaggtaatcatcatagacttagaaaaggcagtggtttcttagatatgacacactcgaaagtatgagtaacaagaaaaaaatagataactggacttcagtaaaattaaaacttttgtgatttataggacaccatcaaaaaaatgaaaaggcaacacacaaaatgggagaaaatatttgcaaatcaaaaacctaataggggacttgtatctggaatatatattttaaaatcttacaactcagtaataaaaagacaaataactcagttttttaaaaggcaaaagatcagaatagacatttctccaaagaagatacagccataagaccatgaagatgttcagcatcattagccgtcagggagatgcatattaaaatcacaattaaataccacttgatacccacgaagatggatataataaaaaagacaggtaataaagtgttggcaagaataaaatggagtcttcagacactgctggtgggaatgtaaaattgtgcagccaccgttgaaaacaacttgctgattcctctaaaagttaaacagaggctgggcgctcggcggctcacgcctataatctcagcactttgggaggctgaggtgggcagatcatttgaggccaggagttcgagaccagcctggccaagatggtgaaaccctgtctctactaaaaatacaaaaattagccaggtgtggtggcaggtgcctgtagtccccgctacttgggaggctgagtcagaagaattgcttgaacccaggaggtggaggttgcagtgagccgagatcgtgtcattgcactccagcctgaacaactccatgtcaaaaaaaaaaaaaagttaaacagacagttaccatacaagccagcaaatgtactctgaggtatgtacccaagaaaagtaaaacttaaaacttgtatacacatactcatagcagcgttggtaagtcacaatagctcaaaagcagaaacaatccaaatgtttatcagttgatgaatggataaaattcaccaatggaatattatttagcaataaaaaggaatgaagtactgatgctacaatatgataaacttaaaaacatcatgctaaacagcagacccagggttagaacacaggcagtctgtttctggattctatgtagttctatcctatattgcttggttttccagggttagaacacaggcagtctgtttctggattctatatagttctatcctgtattgcttggttttccagggttagaacacaggcagtctgtttctggattctatgtagttctatcctgtattgcttggttttccagggttagaacacaggcagtctgtttctggattctatgtagttctatcctatattgcttggttttcacagtcacctcattgcttaggagcgttttcatcactcttgactgtttaagagctctttagtcaatttcctttcaccataacctcttgattcctgtgttgtgccaacagaatcagcaaagtacaaaggaaagctgtcagtgcaattcacagcctgctaagttctcacgacctggacccacgctgtgtcaaaccagaggtgaaggtcaaaatcgccgccctttacctacctttagttggcatcattttggatgctttgccacagctctgtgactttacaggtaatggcccttctgttttctttcttggattgttgggggcccctgccaaatgccccatccgaatgagatctctgtcattcgttccagtgctgatatgttcatatgagcaattcttcacaaaaatggtctccaaacctctttaacactggccccaatcagttaaaaaaacaaaaaaagtcacatagccccatatgtgttttttgtttagaaattatttacttgtttcttcattcattcatttattcattcattgatctgctagtatggaatgaactttataaaccatacaccacaaaggatgaaataataacaagattactgcctttggagatcgtgctctaacaccttgaaataaaggtgttccttcccttttcttttatgaatatgtaagcaaaaaagcggtctcaaatgaacccaactaattgctccatgcaaaaaaaaaatcatggcatatgtcaatattagaaaattctatcatagcagagaaatattgcccttggcactaagtgactaattttgaggttaatatgtctagattagcaacaagatgaaaggataagttgtcttaaaggggttttgtgaaaccccagaatctatttacaaattacattgtggattaaggaatgtagagggaaaaaaatcctcccaaatagaagaacttcttatgttgacctgagaaaggcagtccattggcctaccctctccacagcgtacgtgtgtgtgcacgtgtgtgcgcgcgtgcacacacacacacacacaattcctatcccatcagagtagttcttgcttttcctccagctcaagggaagttttggaaatgtccatgctgctctcttggcagctgaagggtgctgggatctgggcaatgcttccctgagccagcctctttatagtcagtcatccttgaaatcttggaaccatccaggttttcccacctcctccaaatggaaagtgtcatgtgtgactaaattgtttataatactattacggtgacaagtatttagttcatgaaaatgggaccaaacgcctatagtctttaattcatacaaatcataaaatgaaaagcaagtattcctgtggaagtaattctctcctttcttgaaaaaaatcctctagcaaactgctaatggagtaactcagaagagaaaggttgagacaggggttagggtttgtagagttctgttggggccagagtgcaaggaaatgatagaaacaagctcagcacacagggctgagcaagctgcaccatgaggtcagcagcttcctctagcagcgcctgattgcgcggaattgaaaatggagttgtttttaacatttacagacataatgcagagcatggcatgtgacttgtagcccattttgagaatccttgatggcaagtttctaaaaagttccatttcaagagcttgcttgttcccaaagccaggaaccactttagcacacattatccgaagttttcttgtcaattagaatattccgtatcagtgactcggaatcagaacttttcaacatttggtctccaagccttttaaacctcaaagacttctttgtatatgcgttgaactttatgatcatgatgtagctgatgagagaaaaaaacagtgaaaagtattttattgttataggttacacagtacatctattaaatatggaatctttaggttgataaactcataagaatacagtctttcaaaaagatgcatctgaattcagattccagccccatttattaatataagtgacctttgaaaggctcaacctttccgtgccttcctttcctctgtaaactataaaaatgtgataacgatgtctaccttttaggtttacgataaaggtgaaactagagaacttctataaaagcattttgcacagcacatgtttgtatctttcccgatttttcttgtaactataaccctatggcaattaaggggaaataagaatgtgtctctatgttagttgtgataatgttatcaggtcttgcataatttccatgtgctgtttatttaaccatttgtttaaaatcccaatggccttaataagtatttctaaaaattgggttttggctcggtgtggtggctcacccctgtaatcccagcactttgggaggccaaggtggacagatcacttgaggccaggggttcaagaccagcctggccaacatggcgaaaccctgtctccactaaaaatacaaaagttagccaggcgtggtggcgcacctgtaatcccagctactcgggaggctgaggtaggaggatggaggggcagagattgcagtgagcggagatggcgccactgcactccagcctggatgatagtgtgagactttgtctaaaaataaataaataaataaataataagaactgggttttgttttcacaactttagtagaagaaatgttatttacactcaaatttttctaaataattgaaggcccagatggctgtaatgtcaacaggtctagaaaaacatgaatttttaggaaaacatgagtgaatcaatcagttgtgaatgttttaccacacttttcccagaactgcttgaaatattaatagtttttgattgtatactggtagcattcttaaaaaccagacttttaaacggtttatcgtttttttgcttgcatacatctagacctatctataaatatgggtatgtctatattacatagatacaataaattgacattcattttaaacatttgaaatatgacaaattattgctgaacttgtgataatagcttattattctatataaggtagttgcttaattctgtaattgtaggtgtcttctatttggtcattatttaaaataatgccaattattagaatagagaatgaagtttaaaaaattatgttacaggaaacaattatggaaggtttgaaaactttttgttcacacaatttgaaaaattaatttctagcctaatcttgtgctagacattgtctcttagcctgctgtgttttcctataggtgatagcagatacataatgctaaacatcaggtttgaaattactgtgctgactttagtgactgagaagtatcagtctcttattgggtaggggacatggggaaatgtcatgtttgacttgacatcacaaacgatgttttcattgcagttgcagatactcgcagataccgcaccagtggctcggatgaagaacaagaaggagccggtgccattaaccagaatgtggctctggccatagcagggaataatttcaatttgaaaacaagtggaatagtgctgtcttccttggtatgttggtgcacatgtgtctggttgatttttcatttcatgtcttctgtcttctgttttgttttgtttgtttgtttgttttgagacagagtctcactctgttgcacaggctggagtgcagtggcgcaatctcagttcactgcaacctccgcctcccgggttcttcatgcctcagcctcctgattagctgggattacaggcgtgcaccaccacacctggctaattttttttgtatcttttagtagagacggggtttcgccatgttggccaggctggtctcaaactcccaacctcagatggtacacccacctcagcctcccaaagtgctgggattacaggcgtgagccactgtgcccagcctcttctgtcatcttctgatgggagaactcagcttagagcaggcattgattatttccgcctcattttgctggaaagaatcattgtgaggctggcagctgaggtgcacacaagtcagaaagggttctggcaacagcaagagatgtgcagatcaaattcaggcagtcccagtggtgctgagttcaagttcaagaaaccggaaaagaggaaaacttgggaaatctgaaatccttgcaaaggagatcaaaccaaggctctctgagggtggaggcttaggctgtgttcagtctatgtgtgtgtaattcatacagtgtaatgcctccaaaaaaaaagactgaaggaggctggtagcttagcgtaagggcttcttaaacaagactgcagcttttctaggaccccagggagcctaaggagggttgtttggctctgtccttttgcatggactctgtgggctcaaagaggggctcctctgggaatgtatcctctgattcagttgaggtgggattcatctctgttcattgatgagctctgactatcccttgtgaagacagcactgcatcctccaatgtcatttactttcacatttcaatgtagggtatagatgtgcagagaatttaactttcttctcccgtgagaaagcagcatcctgacctaactcttcttgctggatgactttcttgtcttccttcctgcacttagcaagctccatcaccatgaggattggggggacagtgaggcaggaagatgagacagagaaaagacatttgagatttgacatcaccgatcttactgttggagaaatattgtgtgacctcctccacctttctaatatccgtcttaccaaagttagctgcttgaggtggtatatgccttttacattatttgcctctaagggaaaaactcaaaagcccaaagttcacctgttagaacatagtccttgtgaggttgtatctcaagatttcctttattcttgtcaacaaactcagaataactaaagttaaagttgctttataacctctattatttccatccaaaactaacatttccctcccatacccacaaattcctcattgcaatttcaccagtacattccactggatattagctacgctgcatgaaccaagggtgcagcctcattgttgttgtttgtgttgatgagatgagtaacagagagtgcgctcagcactttaaaatgaatacttgtggccaaaatattaaagcaaatagcctgaacccccacaccccagccccaggcaaacataaattatggttaaacttccattacagagaactccacaaacatggatttgattaatttgctgagcagttcatgacccttatgttatactttgcactatgtaacaaagaagctaaatcttgaacagcaagcttattcatggcacccagccagtttccttctcccctgtaagtctaaccctctgctgcccagcacgaaggagaaatacttggagatcttagcagcatgaaagcctctttgtatcactgggattgcagcacgcatgatcaaggcccaggggtgatcaccaggccacactgctcctaagacagaggtactcagatacgtggctgaaagcctagctcaaatactgccccaggtgagcctctttgctgagtagcgctactcaaagaacacagcttcccctgcctagggaaggcagggctactggcaatagatctccagcctagcagtgatgtacagtcatggtattttaagagaacactttgaatttttctgttgcttgactgttaagcctcaaatttttctgttgcttgacttcttccctggcctccatcccccaatctgcctcccttcagccctataagcagtacaacatgctgaacgcggacactactcgcaacctcatgatctgcttcctctggatcatgaaaaatgctgatcagagcctcattaggaagtggattgctgacctgccatcaacgcagctcaacaggattttagatctacttttcatctgtgtgttatgttttgagtataaggtaagtctggagtggcacaactttataccagctcttatctctcaattgcaattctgtcttcttactcatcccctttgtttgggccatggaggcatcattaatttttctcatttctgtattcaaatccataacccatttgtaggtatagatatgatcatttcacagggaaaggatctctgccttctgcagagagaaccccatttctgttgacagagttttggcccataggatgctccagagcagcatctcagtgaagcacatgtcaaacttagctggcatcactgtggagtgtactgttttggtaactctccccatcaacggagatctcaccaaaggacatgtcctcctacctctgtcttgtccagggaaaacagagttctgacaaagtcagtacccaagtcctgcagaagtcaagggatgtcaaggcccggctggaagaggctttgctccgtggggaaggggccagaggggagatgatgcgccgccgggctccaggtgtgttggactggcccttccctgctctctgtcaagcagtttttcactgtttgtggggaggaatgtcctcccaacatgattagacaccattactttcttgagatatttacggtagtgtcagagacagcggattctgggagtctgtgtgtgacatttgtgttagccctgtgcctgtgagggaaagcgctgttctacaattgtaggaaccctgaaaacagcaccaaatgacatcttttaattaaaactcgttgatggtaaaaggtcacctctaagaatgtcagtcatggatgaggtggaaggtgtttccctcaaggctgaggcctttctatgtgacctttggctagtctatccggagcatggtcaagaaactgaacagttctggccccaagatcatcttctcgatcattcagggcactattagaatggaaccagttccctgaaatggcttcagagtgtcccagtcattcaaggattccaccacaggaggaatgatctcaaaaaggctgagcttgaatagaatgaaatccccaggtaccctcagtcttattcaccatgctcaaagtaaaacagagtgacagcttattgtattcgaagggacacagtggcagggaacttggagggagctcatagttttcagtggtggtcaggcaccctcatttgacacccatactttcatacccaataattcagtaagcccccagagtttcacaggaatcctctgctcatgagaaatgtctctctgacactcagaaaggcagaggttcttcttatattctagtctatcaatcaaagagcgggccaacttggacataggtgtggcgactttgtctcctaccagcaacctgcatggactctaattagcccgagaaatggtgctgaggcttctcagttgagcttgttatgaacttctggttatcttggagggtttcatgctaatcaaattcctatcatgcatttcttaactcctagggaacgaccgatttccaggcctaaatgaaaatttgagatggaagaaagagcagacacattggcggcaagctaatgagaagctagataagtgagtcactcggcaactttctgctacttttacctaaagtccaaaactatttttcccaggctgcttgtattactgaaacaactgcatccttccaagggttagaaaatgaaacatcattatctgtgtaaatacaattcatccagggacccaggataatcaaaggtatagggagttgtggtttccagctcttaaaaatttgtcacattgataagcatgtaaagaaaactaatatttctttagcaacctcagatggcttaataaaagcagctgattttgcagggagggtagcagggaaatagagaaagcaggacacggtgcctaggaccgtatactttcaaatcgatatttcctttctggaaatatgtacaagatatacattcagatatatttatgtcagtgctacttaaagttgttttttaaaattgaaaacattctaaatgctccagaatagaaaaatatatttaaaagttggattgccatcaaaatgttttaaaatcatcttaatgacatggggaaatgcttatgacataatgttaaatgaacaaaggcagggtagacacttggttttctagtagtgtgtggctcacgcctgtaatcccagcactttgggaggctgaggccggtggaacacctgaggtcagtagttcgagactagcctggccaacatggtgaaaccccgtctctacaaaaaatagaaaaattagctgggcatgatggcagatgcctgtaatcccagctactcaggaggctgaggaggaagagtcgcttgaacccgggaggcagaggttgcagtgagccaagatcgtgccattgcactccagcctgggtgacagagcaagactccatctcaaaaaaaaaaaaaaaaaaagaacctcaaatctctgatgacatatagtcaatgtattttttaaaggctagaaggaaatttaccaaaatattaattgcggttttctttgggtgctgggaatatcggtaattgatgttttctcttttatactttgctatgtttcctacagtagatgtgtattataatatatattgttaccagaaaaaaaattataaagaaatgaaagaataaaaaaacctgtttggatcaaaatctatgctatagatgaatagatatattgacgtgtattgctatatatgcaacaatttagacatatgaaagctaaaagtatatatgtttgactagatagcacatgtttccgataccgtttagccacaggtagcctaatgagtcccagggtttgctgagcaaaatgtcgtagagctaaaatcacccctcacacacagttgacaaggtaggataccccatgggtgatgaagcacccatcaaagggggtatggggcagacttgattagcagtgctgttttgtaaataaatgtgagttaatatctttattgttaccacaagaatgaatcattctggttaacttatgggactttggggagtcacatttattttaaaacattaaagaaataagtatatttttattatagatgtgacttggaaacccagttgttggtatcatgcctatttgctttgggtatgttattcttgcactaaattccctggactgatttataaaatacttggatcggagagtccatacattctacttcgggcaatgaacaacaactacaaaatatgcatgccgtgggtgctacagaattgcttaggtggtttagctcatctactctactagattaaaagaagacccctaagtaggcctgttttgcctgggctgtgtaaactggtgttttggaaaacctttcccttttgcttgcaggagcaacacaatattggtccttaccacgcatggcctaccggtttgctctaggttagttctcagccctgcgctacctggtgggctgctggttgtcagagctaatgattcacatctacaaattctcaggggctttgtgctttttttttttttttaaaagggaaaccatagtaaaattataactgttcaacctacctacctggaaaatttataattataataatggtgtctttcaccctctttctgatcatttttcgattattttggctctgtttcttttagagcaatgatcttcaacttaggctgcacattagaatcacctggggagctttaaaacctgtcagtgcccagctgcaccctagactacttcaattggaaactccagcaggacccagaaatcagtatttggtaaaacttcccaggtgattctattgccaccaaatccattgttttaaaggaatagatggtaagcttttcttttcttttttttttcttttctttttttgagacaaggtctcactctgtcacccaggctggaatacagtggcacaatcacagctcactgcagccttaccctcctggcctcaaacaatcctcccacctcagcctcccaagtagatgggactacaggtgtgtaccaccacaactgcttactttttgtattttttgtagagacagggtttcaccatgttgcccaggctggtctaaaactcctgggctcaagtgatccacctgttttaacctcccaaagtggtgggattacaggcatgagccactgcgcctggtcagatggtaaagcttttaaaaaaccagattagtgttagtgatggttgcacaatatgaatgtacttaacactactgaactgtatacttacaaatggttaagatggtaaatttttatgttaggtgtactttatcacaatacaaaaatttgggaaaaaacagattaggacactctagatttgtgctgtccaatacagtagccattagccacatgtgactatcaaatgcttgaaatatggctagttcaaattgagataataaatcaagataagtgaaaaatacgcaccagattttgaaggcttattgtgaataaaagaataaaatatttcactagtaatttttatattgcttacatggagacagtattttttatcttttaggataaacaaaatatattaaaaataatttcactttttctttacttttttaatgtggttaccacaatatataaaatgacatatgtggcccccattgtttctactagacagcattgctctaaatttaaaactaaactagcagtcaattaattaaaaaggatgataaggggccgggcacagtggctcacacctgtaatcccagcactttgggaggccgaggtaagtggatcacgaggtcaggagatcgagaccatcctggctaacgcggcgaaaccccgtctctactaaaaatacaaaaaagtagccgggcgcggtggcgggcgcctgtagtcccagctactcgggaggctgaagcaggagaatggcgtgaacccgggaagtggagcttgcggtgagccaagattgcgccactgcactctgcactccagcctgggcgacagagggagactccgtctcaaaaaaaaaaaaaaaaaaaaggatgatgaggttaaaatggtaaatttgatgttatgtgtactttatcacgatataaaaatttgatggctcatgcctgtggtcccagatactcaggaggctaaggcagagcatcacttgagcccaggagttcgaggcttcagtgagctatgatagtgccactgcactctagcctgggtgatagagcaagaccctgtctctaaggaaaaaaaaaaaaaaaaacttttagatttcatttattttacacatatattatcacttggaaaatgagaaaaagtgtcaagtggcttgggaccagagagcctatcctaaacatgaaaacaagtaaaacacacagaagtacttattttttgagtcctcagtggtatgtaagcagctgcagtgcccccattattaggttaatgggacgcaagaacaggtaagtggtaaccctggcccaggacatatgagctgatataatgataccccaaccccatggtaacatcttggctactgaggcatcttggtaaagtcaattcttcatacctccctttccttgcaactagatttggatgatgatacaaaatatccctttacagcttcacttagatttcataagaatggatgggctagcaaaaaaaaccattctgattccttaaagtgaaacctaatagaggagcgagcaccaggcaatttcccattccctagtgggcaatgaccagtaatgtccggcaggatattagatcacctgccctacaggaatacagtcttgtttcccaatggaaaaggacgaaagaccccacgcacttggctgagcaacctcaaggtgatctttgggaagttaagaggctgactctcccctgacttggctctgaagctccaccctttcctaacccagccgcatcactgccaagttcacatcacatccagtctcactctctctcgcatgttgcaggggcttccccttactcagatctagcaatggttttcatgcgtgaaatacagccatggccctgaggctttaggcaacaatctgagaggggagcttaattgctagtagcaactaataactgcttctctacccatagtgttatttttataattgtcctcatcattattaataatagtggggatgaggatgaccaggaaaccttacctagacagttgtttcgacaagacatgaatcacagaaggcacctgcactgtagttactcagggccagttgctctgttttcatttcaaggttgactattttggagatttctttacaccttggtgtatagattgccatcatgggaacctggccaggtttgacatgcgctttaatttgacctcttgttgtttcctagaacaaaggccgagttagatcaagaagccttgatcagtggcaatctggctacagaagcacatttaatcatcctggatatgcaggaaaacattatccaggtgaggaaaacaaacacccaatctgatttgttggccatgaatatgtttactagaataaggacttctttatgcaaaattgtgaaagacataaatgtgatcccatagtaccttttttaaaaaaatgaagttgagaagtttactatttacaacagtgtctaccttataaattccagagataccaaacattcttctggcttctttgacttagggcttacttggagagggttaggtgtttggccagctgaccctcttggttaaatctgtgtgagtatgtaccaagtttataatatggatgttgggtttatcgtttagtatctagaacagtagtggtaagtagaattttttctgatgggtcaactccagttgaatgatggtcactgtctgatatgggagctatgattatgactaggctaggtaaaaagagtgctaaatttgacaaatgatgtcttctttggacttaaatttgttaaggaaagtcatttgtaccatgaatttgccatccctgctgtagaaaaatatagctttgtgaactttgtaccatactaattttatcttctatgtgattatttccacaaattcccaagctgtctaggtaataatgagtttttaattaccctgaaaaatgagttcttacatgtttccattgagaagtcattcattagagtaggtccaggattgcttttagggctagaagaaatatcgttgaaacacagtgaaatcttaattctctaacttttgaattgtctaaaatcaaagtaatcatcatacaaaaataaacacaaaaagtatgtgatatttttgttgactttaatatctttgataacttaaatgcttggtatcacatttaccttatctttatatagcacaatattaggtgccaaatatctatactagcccccaaatatatttgcagttttcaaagaaagctgaaaccttttgttattatccttggtgttgttagtccttctgtaggtgataaacaagcttctatttagaaacattgctgccaccaagcagcccctgttgtactgggaagcccacaattgtgttttgcatcccataaggaaagctatgtcttgtatacaaagaaagaactttccaaaagatgtgacccaggatgagggagatgggccttataccttcatttaggaacccagaattaggtataaatcccaaactcattggaagcattgaaataaagccatttggaaataggtcttcagttcccatggttaatggatgatacccatggtggctcaccaaactcttaagactcaccactggacatggaacatcagcattactgagctaattgtcaggaacatccagttcattggcacagtgcagggattcaatgatgctgttcttccattcccccaggcgagctcggctctggactgtaaagacagcctgctgggaggtgttctgagggtgctggtgaattctctgaactgtgatcagagtaccacctacctgactcactgctttgcaacactccgtgctctcatcgccaaggtaaacttgggatgcttgttttcttcctcttaattaagagtaagattctcatctagcttcatacttctctcttcaggtggaccaaaagtcacagagcatattaagtggcatcacagtaaaggtcttaagtcttcctaggaagaaagcagatgccctgattctgtgggaagccaccatggagaggaaaagcagtggctcccatatttgaagtgtggacctaactctagaagtttaaaatggccattcgctgaaggtctatgacatgagaacagagatcaactgagtgacttagcaatttcactctttctctgtaatacctctgctgagtgagattaaatcctctatgtgacgcccattagtcttacaaaatgtcatgccataaaatgccaggaaggtcagaaatgaatttctcacggcctgaggaatgaggattatcctggggtaacatgcagattatttttccctttatttatttatttatttatttttgagactgagtctcgctctatcgcccaggctggagtgcagtggtaccatctcagctcactgcagcctctgcgccctgggctcaagcgattctcatgcctcagcctcctgagtattgggattataggcgtgtgccaccgcacccagctaatttttgtattattagtagagacagggtttcaccatgttggccaggctggtcttgaactcctgacctcaagtgatccacctgcctcagcctcccaaagcactgggattacaggcgtgagcccccgttcctggcctatttttccctttattgaagatctcaattggtgccttctacatggggtcttttaaatttaaaaagtaaaattcttctgctcatccttctcaggaccattttctctttcttcatcaccagtaatttcccaggaacccaagaaactcaggtttccttccatcatagttgtgatttcaccagtgaatgcgacctggctcacagtgcagttgataacacagctctgacccttttagctggacagttcattattaaatctcaagtctactccattgcttaaatccatcttctgattcacatagctcattatctttatggaataatgcattaactcttctaggctttttgcttgtccaaatggacatttgcatatttcaacggtccagaaagtgtatcaaactgccaagtgatgcctaatggccctttatgtctctcctagtttggagacttactctttgaagaggaggtggaacagtgtttcgacctatgtcaccaagtcctgcaccactgcagcagcagcatggatgtcacccggagccaagcctgtgccaccctttacctcctcatgaggttcagttttggagccaccagtgtaagagttcaaaccagctgagtgacctggaatcagtagagaaaaattgatgtaaagcatcagctgcgaaaaaaaataaggaaattttgcagtattgcagtttacttctgtcctgtgagaaagaaacaattgagtatgtagatagatagcagcttccattttaatttgcatctaaaagtgaattcatcagataaatgcagtggtctctatcagtgtgtttctaaaatagacagccaggggccaggaacgatggctttcacctataatcccagcactttgggaggccgaggtgagtggatcatttgaagtcaggagttcaagactagcctggccagcatggtgaaatcctgtctctactataaatacaaaaatagccagatgtgttggcgcatgcctgtaatccaagctacttgggaggctgaggcaggagaattgcttgaacctgggaggcagatattgcagtgagccgagattgccccatttcactccagcctggacaacagagtgagacttcatttcaaaaaataataataataaaataaaataaccaggtgcagtggctcatgtctgtaatcctagcacttcgggaggccaaggcaggcagatcagatgaggccaggagtccaagactagcctggccaacatggtgaaacccccgtctctacaatacaaaaaattagccgggtgtggtggcacacacgcccgtaatcttagctactggggaggctgaggcacgagaatcgcttgaacccaggaggcagaggttgtagtgagccaagattgtgccactgtattccagcctgagaccctgtctcaaaaaaaaaaaaagaaagaaagaaatggaagagtattttagattaaaagttatcatctgtgggggaaaaaatacaatagacaggttagaattcagaagagtgtttcctgtttctaaattctgactagctagtgccagaatgacctgtggaagaggattttaaatgatcggtgtcatctaacctgagttttattttaatattttatttatttatttattgagacagtgtcttgctctgtcacccaggctggagtgtagtggcactatcagagctcactgcagccttcaactcctgggctcaaatgatcctcctacttcagcctcccatgtagtaactgggattacaggcacgagccaccttacccagctaattttttttgcatttttgttgagacagggtcttgctgcatgcccaggctggtctagaacacctgagctcaagtgatcttccctcctcagccccccaaagtactgagattataggcatgagccatcctgcctagccaagacttgagttttattcaaagctacgaagactttggagttcagctttattatagaacagtcaagtttgctttagtttgtctagattttgataccttctttggaatttccatttgtggccatgttaataagtatgctcaagtgatatataaagataaattggcccatggaaaaaagtcagcctcctccaaatgtattagggatgattatttaaaagacattcctcaggggaccttgaggtagccatgtttttccatgggcctgtaaagaaagaagaaacaaaaccttgttgcttacccggagttcaaaatctcagaaatgctggccacagaagtcccctgatttatttatttagagacagggtctcgctctgtcaccgtggctggagtgcagtggcgagatcttggcccactgcaacctctgcctaccaggtttaagcaattctcctgcctcagcctctcgagtagctggaattacaggtgtccaccaccatgcccagctaatttttgtatttttagtagaggcggggttttgctgtgttgcccaggctgatcttgaactcctgagctcaagtgatccaccctccttggcctcccaaagtgctgggaggctgagccagaagtccctttcttttaataaagtttaaataaagtcccaagaagaaactcttggcacaaaaggatatactgtattcttggacccaactttataagaatcttccagcttgcagcacaaaggcagcccagtcctcaatgaaaatttaaagggagcctgacagatttatgtgagagcaatgtccatttaaaccatttaaacaacaatatgaatgttgtgcaaagtgtagctcccatttcattgagagaagaggaaataattaagacggggcaaaggaaacactgaggagttgtttgtgtctggccatgctgctttcagttatctactgctaagtgtgtcttatttacttcatcttttttttttttttcactgatgcagaattttgcaagagtaaagatgcaagtaaccatgtccctggcatctttggtgggaagagcaccagactttaatgaagagcacctgagaagatccttgaggacaattttggcctattcagaagaggacacagccatgcagatgactccttttcccacccaggtacaccgaagcacataccttgtctcatgcatgagtttgggatctgccaactattgtgtatgtatgtatgtacatatatacacaatttatatataaatatataacatttgcaagtatttattgtccaatatgcatgtgctctcagcactctgagaggttttaaaaagaaatacatccatcactgtccccagtctcaatatgctaacagtctatttggagtgctcagtctcaaaacaattaggaggcagtacaagacaagtgatacataagtgcaaactgtgtggtaaggagctaaatgctatggaaggttagaggaagagaggtcgtgatcaataaacaatctggtggccaggaaagcctgcagggagggatgacactaaaggctggggtaggattccgctaggcaggggaaaagtgagggggaaattgtgagtagttgaaacaatgaattgtttgtatctgtagggatggtaaagggaccagcttgtctggtgaggggtaaggaagggccgagtttgagagagcttgtaaacaaggttgtcctaaggaaatgtgtaaggacagtcatctcttccatgtccattacgatgaccgtggaactctagcctgtcccatttgtcttttaactccagctcctagcctgctctatggtagggtcttaattaagtgagaatgaatgaatgaatgttttcttttattcccttagtctgagaaccctatttccggagtctgttttgccctctcgggcaatgttgcatcctcattctcagaatctttttcctctcctctacatcaaatcgttcctctctcatttcatcttgaccatactcctttagttccatcatttatatagaggtattcaccaacaagaccaatcaaactatgggcagtttaataaaggtcttcagtgccttcacccaatgaaatgactctagtggtagaaattttaggagccctggcaagctggcagaggggaacggggataagacaacattctgtggctgagttacctgccagggtctctagatcaagccatagtctctccctgtttttgtactgcaggctcccctggacctccactgttggttttataattaagaataaatgattacaagaggttctaaaatctctgaagccctgggaagatccaggaggcttctgagacatggaactcaagctgaggtcctaagctgcttcctacttggtataaaaatccctgatattccagagtagagtttagaacttttcaggttacaaataactgaaactggttcaaactaatttaaacaaaaatgttggagatagagatagtatgaggattcaggcagatttctggatctcaagggccaacacacatccaggtctcataaactcctgggctggcgaagatgaaaactacagagtcaggtctagatgactccgccatccctagtctctgctgccctctgatccaacccttcccatggcttccccttgcatttcaatgtaatcctaactcttcacctgggactacaaagctaagattattttgaggcttacactttttgcaggtggaggaacttctctgtaatctgaatagcatcttatatgacacagtgaaaatgagggaatttcaggaagatcctgagatgcttatggatctcatgtacaggtaagctttcctgacacactcaagggacaccatttgggggtcgaggatttgtcactgtggagttcttactaatgtaatgatcacagctaacatggatatagtgatttggatgatagccaaataatatatagaaattaaacattcagagtaggttaattcatatgtaagttttcagaaggatctccctaatttaaagtgaggcataataatgttattaaatataataacattattaaatataataacactatcttctacttaccacagaatcagagaaagaataattaactgttataggaattattttccatatgcttttgttccaattatattcagacatacatatatagttttactttagaaatcattttttacgcgtagtttaaaagttggtcttccagtccttgttcaggagaaattacttacagaggcaaaattgttctgatgcaacatcatacaaagggcagtacttttgtcttctgttttattttgagagaaaggaaagaaaaggcagaaatttgcctgagagccattaaaatagacatcatgttatcaggtattttttccccataaggcttttactaagtactatttcttggaggtcagcacagcttaaacatggaataaaaatagttggactaataaatgttttcttctgtctcgttttctggaaatatagggcaaaatctcaggtggaggggtacagggaactcttggggagaaaaaaagaaaaggtcacacaaagtagaagaacagtgtcattaacccactgtcctcaaaactacttctcactcaatctgtcttcagaattgccaagagttaccaggcatctcctgatctgcggctgacctggctccagaacatggcagagaaacacaccaagaagaagtgctacacggaggctgccatgtgcctggtgcacgccgctgcgttagtggctgagtatctgagcatgctggaggaccacagctacctgcccgtgggcagtgtcagcttccaggtagggtgtgtgcagcttttcccttagagcagtggttctcaactggggcgattttgtcccccagccccagggacatttggcaatgtctagatacatttttggttatcacaactgggatgggtgagtaggtgctactggcatctgactggtagaagccaggatgctgtgaaacattctgcaataggagagctcccctgacaaagaattgtctggccccaaatgtctgtagtgctaaggttgaaaaattccaagttcatacattacatttgcttcttctaattgctttcccatcgtcgttgggttttttttaaattactgtttacaataatggcacctagccattattaatagcactttaggagacatttgcaaacactttcacatgcatggcttcatttgaacctccccgtaaagctgtgaggcaggtaggtagggaaggcggttattattcccacttcgcggatgagagaactgagagagcaagttttctaaggtcacttaaactctttttcaaagacttgtagttgacacagtatactgacattgtgaaagtttggaaaacattggataaatgattttcctcctggcccattcatttgattccactcttcaactttataggggcccactctccaatccaaaaatcaagaaagaatcaaattgacctgagaagggagacaaaaggctgaatcagtaccttcttaggataagctgaaaattacccacatttggcaaagggaaattgtctgccagacctaaaagctggctcggatggggatgctcagtggccacttaaagtgttcttactgaatagtttaatagtctttagagagagagaaaataaaaaagcacaatgttgggtactttttttgtaagagacatagtttgtagagatgaccatccctgaaaccatgaacaatatagctacagtaatagagtgtttttcaagccagactcacgaagtcatttacaagggtttgtattattcttgtttgaatttacatggctgattttatgaaaagctttgttcttgttattgttcttcaacacaattttgtgatgttgtatgaaccagaaagaaagaacaattcaaagtagcttccccaggcttagagaataagtcactgaaactatgctggtgcagccaagagcttctggttttccagaacacagcaaagctgggtattgcctcctatgaataactcctcctttcttatggtcctcaagaacaaaaatagtcattctgtgatttcatgcttggcaaatgaattttcttcttaattcagaaatgtttgttataaaagctgataattaaatctcatccaaaagcataaaaataacacctgatttcaaatcacatagaagtgtacaagaaagttataaaagttattttagatgtatttgcttcttttctcaaatttattttgaccatgtgatactatcaaaaataaatattatagtactactctttcaattcccaggaaattgtaaggtttagcacttcatattgtttcatttactaaattattttatacttcttttattccttttcccatgactatattttattttatatttatcacttaaatatcaattgcatttcattattgacttttatatttagtaagccttactgttctaattttacctagaattcagttgatttgctaataatgacatgccaaagtgaatcattattacacaatcaacagaaatattccacattattccgacatgggggcatacagctctatctgttcacatatatttatccattgattccttcttttagagaatatttattgaatacttattctgtcctcatgaacgttacattctaaccagagagacgtaatataactaattattccaatctttgttcagttataattatgagaaatactgttataaagaggcacaagatattgtgagcatttatggtccaggccctgtgggtcagggaagggtgaagaaggtgaaaaggaaggcagaagaaactgaagtgtgagggcttcttgatgtagaggaggcaatgagttaggtgttgtcagctacagaagagaagccaaattatattaatgtgtatgagtgaattcttacttctctcaaatgggacataccaaatcaatttggaaatgtagctggcaagtgaaaggacacccaacccagactgacagaaggtaaaaatggaatttatcagcccgtctgaggaatgtgagcctggagtagcacctgccatactggacctaggggcccaaacaatgtcagcagagctcactgtcatcaccacttcccatctctgccatctgttgtgtcagcttcattcttcacaggcttcccacaccacagtttaggtttacatctctaggttcaagtctaggagagaagagagatgcctcctttctagcagttgcagagaaagcctcagtgcatcttactgatcctgtctgaacatctgatcctgtgctcatccctgaaccagccatactggccagagaaatggagtgctctgatttactgaccccgggtcatgggtccacacctggaattatgggtgatttcttcccctaaatcaggatgccttactttatagaaggaggaaagaattctagacagcattaacaacagatgtccagtgttgattttgcaaatgctctgtgctttaattttcaaccttgttctgctccaatgaaatagagcttttggaaaagatttataaactagagataaataaatatgtgcaaggaaaataactttgaggtcactgaattccaggaaactgagatcactgaaattctgtgtcccagagtgcaatatttatttcacaactgtagatacggacacattcttagatactgctgttacttgtacctccctgatcctgaagccaagaaagtctgcagaatccttttcctctgactacagctaatgaggctacatagcttcaaatctgttcctctaatgtggaaaattgcatacattctaatagtattagtatcttgggttattaaatgctttcaactgaatttcttggatcttctgttgtcacagaaacatcataatacatagggcaggtttggaagaaagactggccacaaaggctttgagagcctcctcctatattcctaaaactacgttacagtattgcatgtgaagagatagggctatctatgacaactatgtcctgactgattgctaaggttgattcacatgatcttgctaaccaggccagaaggcagacagcttttagttcacaagccaactctgatcagttagtagtggctgactggagaactatgcttaagaatttcgagactatgtccaagctctggggaaaaagtgctacagttgattagttatgcctgccatgattacagcaataggaaggagtggcatgtgtgccacctgtttgtaatccctaaactgggaaggtttcccatttcttctgtttttcatatgcatttcttccatagctgtgagctaggaagaaaatgattcttgacctgtcacatattcactgccagggccagtgctagggtgaagaggcactcaccctcagggtcgagcgggtacaagatcagtacttccatggccctaaaagcgagtacctctctaaattttgtcttgggtttctcatttggttcaccccaaccatggtctctgcatgctctgctagaggctctaaacgcaatagtttatgtaaaggaaacaaatgcatggaaacaaaatgttcaggaagaacaaaaacacacacacagtaactgctgcaatgccatgaaaacttccttaatgaagacagcctcgcttgctgttgtcgtatgtcatggctgtttatctgagtcaactccagagtagcaacatacttcagaaaaacaccactgtaagtcagaggtccactcggtgaaacagggagcctagttaatgttaattgggtctttgccttttgaaaaccaggacaccagccctatgtcccttagggttgtttcactaaagtaactcagctgttgtgacattgaggtaagtgtcctttatacaaaatctcctaatggttaaaaagaaaaacgtgaggtttgaagaccagttgctcagtgcgcctcttctaaatgaatggcagacagatactctcggggtagaattacagacctagtttagtcacggtcttggtaaggatctgcacaccagcttcctcgtttccccattcggggttcctgtggtctcttactagtctggtcgccctgttctccaggcttatactgtggtctctttcagaatatttcttccaatgtgctggaggagtctgtggtctctgaggacaccctgtcacctgacgaggatggggtgtgcgcaggccagtacttcaccgagagtggcctggtaggcctcctggagcaggccgcggagctcttcagcacggtcagtgcccagagggcatcccggggcctggcctcccatactccagctggacttggggtgctgggaacacctggtcttaatggcccagtcagccccacttcccgaggacacgtgccagggtgtgcggggcaggggatgggcccggggaggactttgatgtatgcaaattgcatgagcttcccaagggagctgagataacctttcatcacagtgccgatctgagcttcactgtatgctcattggttgggcagcagtttcacagtattatttctatttaataggggtggaactaagccacagagaggtgaaatggcctgcccagggttacacaataaatgatgaggcatgttttcactccctcgtttttcctctcagagagaaaaaaattagggaggaaccactgggaggagagaggaggaatacacagacagtgtcttccctcctagccactgtgcagtctgaaggaccatcacagaccaggaccagcttacagaaatgtgggcacagaaaccactgagactcctctggttaacgtaatctggatctaaacactcctagtatatatactagaaaaatatatagagagatgaagtcattgagattcagggcaaagaggaaacactcttgtctattttcttttctttttttgagacagagtctagctctgtcgcccaggctggaatgcagtggtgcaatcatggctcactgcagcctctacctccagggttcaagcaactctcctgcctcagcctcatgagtagctgggattacaggtgtgcaccaccacactcggccaattttttgtatttttagaggagacaggatttcaccctgttggccaggctggtctcaaactcctggcctcaagtgatctgcccatcttggcctcccaaagtgctggaactacaggtgtgagccaccacgcccaacttgttttcattttaataatctccctcctcctttacattttaagccaagaaagtattcagtactttactatatttagctgacccaattttgttttcatctatactatactcatccttattttccagtttttatttccaagtttcctctctacaattttatttattttaattattgttttaactgtcttctctctattcttgctttccttttcaagattcagaaaatgtctaatatactctcatttttcctcaaactcaacaaaatgaattagaatcctactaactctttggaggcatacatttagcatctggctagaggaggacctctgatgaaatttaaatatactaaaactgcctttctgaattgctgttagtccctgctaccaaacttctctcctgttttttcttttcgttttgttttgtttttgtttttgtttttgaggcagcgtcttgccttgtcacccaggctggagtgcagtgatgcagccttggctcactacagccttgacctcctgggctcagcctcccacctcaaccgcccaagtagctgaggctacaggagcatgctaccacacctggctgattttttaatttttttgcagagatggggtctccctatggtgtctaggatgatctgaacttctgggttcaagtgatcctcctgcctcagcctcccaaagtgctgggattacaggcatgagccactgcactcagccagtatttttttttcccccgaaagctcttctccttacttatcgccatacaggactacttagcgaggtgtctagttcagtttgaaggctaccactgtcccaaaagtgctcagataccccttcttgccctgtgaaatactgtgatacaacaataaattcactctccagcacattgtttggacaatgacctctggttgctcttcttaagtttccagtggattaaattctctctgatgctcttctcctctttccaagggaggcttatatgagacagttaatgaggtctacaagctggtcatccccatcctagaagcgcatcgagaattccggaagctgacactcactcacagcaagctgcagagagccttcgacagcatcgttaacaaggtagccggggagcctggctggcaggtcttgttacctggtggcaggcgaccctgtcctacagatgcttagccatccttcctctccagggagtgatttatctttagcacattgcttttgctctcacctgtcaaacagaaaagggctgaaattcttctaacagaggaccaaaattccatatgtgaaaacatacagcttaaattactttataaccaggaaatgtgagaaatttttaagtgtaattaaaagaagtcccagaaatctttcatgggattccttttgttgttatttctgaagtttattccataagcattaaatttttttaaggagtaatttctgtttacatcagccataggagtaaaatgctttgttaacacaatgagagacccctgccctttgcaactcagtggctcctcaggatgacataactaaggagagctttttatattttgttcctcaggatcataagagaatgtttggaacctacttccgagttggtttctttggatccaaatttggggatttggatgaacaggagtttgtctacaaagagcctgcaattaccaagcttcctgagatctcacatagactagaggtaagaaaagtgattctgtgcgcctgacctggtacactttacaaaaacaagttagagtgggtcatcaccaaaaataaacaaataaagagttatggattcatcattgatctctacataaagttttcccctttgcatttataaaaggcaaagtagaaaggtattaggtgagatcatgaggtgatgtaatattttgatagtttttccctaatactctgtgtatgcttttcacagtttggaattttatatggtgaatatttattttgaagtctgtgcaaaattcaatcaaggtcatgtgctttcttatcaccctttccaaatattagtagtttatactagtagatagagagtagtagagtttttcaacatgaagtttagcatcttgactttgaagtaatctagccaaatgactgaatcacccctagataatggtgaggccatcctttaggtatcactggatggcacctggggtccttctgatgtggagctactcagctgtggccagcccggctccaacctgccagtgagtgacatttggtccataatacaacagaaaagtgtagcatgttgttagaagcaaagctgaaagcatggagaaaaagagaaacagcctagagaaaggtcaggacaaaagaaacacaggttataagggccaaacactaagaactcagtcaaaggtgcctccccgatgggatttggatgaacaggaatttgtttacaaagagcctgcaattaccaagcaggactggggtcctttgaactgctcacaattaaccaaagattcactccttaggctttcattgctttgaatttgtgccctcctatgagtgtaaaacttaaaacatttgtgttgcctaatggcttcgtacactctccatccatgccaaaaaagacaagagggtttatccttacttgactcaaagaagccattgcccagggtggctgggtgagttgccccaaaattgtttagcacatgagaaaaagagctagcaattgaccccagtccacttggttccctatattgtttcccctacttagaattagaggtatatattttatcttcttgtgcactgtgatttgccacaatatgggaaggctggtgacttccaagttcccagggtacagaaggcgagaagtaaagagtgtgataccccaggagatacctcagcaaatataatgatgttagctgaattagaggccaagcatacatcttatagggaagcatataccagttgacagtgctatttttatttttgtcttaggaaatgctgaactttgctcattagctcagaggaactctcaataatcagtgaacatcattctaccttgcacttgctccaaacttatttcacttccaagaagacaaagagttgcattatgttaaaataacctttataaactgttggttcttcttacctaggcattttatggtcaatgttttggtgcagaatttgtggaagtgattaaagactccactcctgtggacaaaaccaagttggatcctaacaaggtatacaaaaatttacaaaaactaaccatcaagctctaaatcccttcgttctctacccaagaatacctaatgatctcatctatctggactctccaagtcacttaaatgcagtcaaaccttttcgtctagagttcaactactaattggtcagatcttaaagaaaatatagtcaaaggcaggaatcataataggagctaccacttattaagcaccaactgtgtacctggaactgcattaggccctctacatacatcattttatttcatcctgcaacgacccctggaagtagattttgtcattcctattttagagatgagaaaactgagacatggaagagtcaagcaagtttcaaggtcatgcaagcagcagagccagtactcagacttgaggtctgttgcttctgaacccctactcttcagcactgctctttactgcctttttataaaacctttaaactctccatttcaaactcgacaacacttagtggcttccttctttaggctgcaagtattccttccatccaagtccgggatcactgtgctgttgggggaatggtaaaaacggcttgggtttgggtttcctcactttcacaagagggtatgttccatttcaccccaaaatgggtgtacagttctgatgctaacacgtggaggtggtatcagctcccacagggtaaaggctcagtcctcctcaagactgccctgacttcagatgccagcttcaagagggacccccaggccagccacgcttctgatcagccagctacaaatttgggagtttctataacctgttagcttgaaaataggagaaaacaaagcaaataataataataataataataataataatttgggagtttctatgatacctgttagattaaataattcactacaatgactcacagaattccaaaaagtactctggttactatcagagtattatgataaagggtgaacatctttttgtgcctttatttatggcttcctggctcatcagtgtgttctccaaccaggaagctccgccaagtctcagtgtccagagattttgttggggtttcattatgtaggcaaattgaatacagtctccagcccctctcctgtctccagaggtcatccagttcctaccctgtaatcacagaattggtctttttggtggccacttggcatcctgaagctatccaggggcccagcatgagtcacctcattagcatcacaaagacacccatcactgaggaaattctaagtgtttctaaagctctgtgctaggaaatggagacaaagaccagacatattctttattataccacaagctgatgctgcccactcagcccaactcacatgtccatgaatgagctttctaagttactggaaatagtgcaagtgcaaggtatcattaagggccctgggacagaggaccattcaccatctagcaaacctataaaatgaaaggtccaaactcccagttccatcttccaggatatgaagaagataatggaagaggggaagaattggccaaattgaagagtttgtttttctacatttttcagaatgctttctcacttaagacacattccctagcctcggcttgaaagcagtggctgtggtaagagtttaactaatcttcagacacacatgtctgggagatggagttggccgtgtgcccacagtgatctgtacatagcacaagctgtgtaaaatgtgacctccctcagccaaggtgcccttttcccctcttttaaaattcccagggtaggttgtgagagtttggaatgagagtctgaacccagagttacaaccagatttcattatactaagtcgtgatttacagtctgaggtcagtgaccccactcatccctttcagtgggtgagtgtcccagcatctgaactcatggtcactttttttcctaagagattgtcgtctttaatgagtacttattcgctctgtgtttgagggtggaggtgatgtgagtgtgtgtttaaatgaggcctaggcagtaaaattcagttttggtgtttagttctatgagttttgacaaacacatgtgactaccttcataaccaagatatagaacagatccaccactccaaaatacttcccgtgcccattggtagtccatgttgcaatagttccttcctttccgttgctgagtagtattctgttgtgtgactacctcaccatttgcttgttaattccccactggagtgacatttgggttgtttctagtctttgttatgaataaagttgctggagacatttgtgtacaggtttttgtatggacataagctttcatttctctcctgtacacacataggagtggggttgctgggtccaatggtagtgcagtttaactgcataagagaccgccagcttcttctgcaaagtagctgtgcattttgcattcccaccctctgtgtatgacagctctagctgatctccatccttgccagcacttgatattgttagttttctttagttcggccattcatgcttcctcataactgtgaggtagtcattgtcattctgtaaaggaaagtttgtctctttggaatagcagtttgcaaactctcataccaaggcttccactgtggatcagtttgctctgctaggaaggtgcggccggtggccctcactctccccacaggcacattcccctctccctccttgcagccccttctgtccttgggggtggagaggaggaacttctgctggccacattctcccctgcatctgtagcttttctgcactgggcagggcggtgccggcacgccgtgttcctgcatgcccctccattgcgtcagggatggccgtttgcagaatagctcatcttctccctccgtgccttttcccccttaggcctacatacagatcacttttgtggagccctactttgatgagtatgagatgaaagacagggtcacatactttgagaagaatttcaacctccggaggttcatgtacaccaccccgttcaccctggaggggcggcctcggggagagctgcatgagcagtacagaaggaacacagtcctgaccactatgcacgccttcccctacatcaagaccaggatcagcgtcatccagaaggaggaggtaatgcacccaagggattggccaccactggatgagtgggctgggtggcctcccaggaggacccacaaacctctttcacagtggattggactgaaaacaaggagggatgcacttgaaatatgattatatggttgtcctttcactctcatagtgccagaaaatcccatttaggcagctacatattttatagcactattgtatattaaatatttaatattttaaagttatatctttagtataagtgtgtttatgtatttaattataatatttaatatatatttcaattataaacttgtacaacagatatatttaccttttaaatattttatataaaatttttctatatttcaaagcttagaggtgattcaagcatagtcgtgctgttaattattggagacgggacctgcacgtgggcagccccagtgaggcggtggtgtgctgtgggaaagggccgtgtaaggtagacaagttcactgactagcttctagtcctagcttcctcctgtgattttaaacaagctacgtaccttcagtttcttcatctatgcattagcaggaaagacctctaagtacagtacaagattatactcattttattaataaaaggactggtcaagaaggtctctcaaaccacagaattgttcaaaattctacacaccataaacaacttattattctttaaaacacatatatatacacttatttgtcgtcctttttatgcagggccacagacttctctgtgactgtgggtttgctgatcacaattcagcattttcttttataaaccacacccgtagtgctttgtccatgattttcagttttgctttgtgtaagcagagtgagagcttaaagatccttgttaaacaatttgagagcagaagccttctggatgtttatgatgtttttctccccgagactttgacagcagtcttgtgcacacctaatatgacaggaatttttatagcaactcactttcataatatcttgtccaaccatttggcttggttttcatagaaagaaatctttttctttccacacccatggttcatcagtttctccattatctaattagattgggtcattaaaataacaagtataacaggcataatcaagttggtgaacaaacacagatgaattgtggtgaatatatacctcatcaggcagaagcagaaatagctgagctaactggagagtcatccagcaggtagtgttcagctgggtaaccacatcagggtgtggctttcacagaagctgaagaaagcctgaagcagtgactcagtcgggaggaggtgggtttagaagccatctgctgtacttcctatacttcttggtttggacttttgaacactgagacattctaggcataacacagatataaactcatggtgcccaaaagcatttcaaaaccttttcttttcttcattcctgccttcctttcctttccttcctttcctttcgttcttcctttttttctgtgtctctgtctctctttctctctttttcatttttgagacaggatcttcctctgttgccctagagtgcagtggcatgaacatggctcactgcagcctcgacctcctgggctcgagcaattttcctacctcagcctcctgtgtagctgggactacaggcttgtgccaccatgcccagctaattaaaaatacagagagatatatattttgtaagagacaggggtcttactttgttgcccagtctggtctcaaactgttggcctcaaacgatcctcctacctcagcctcccaaggtgctgggattacaagtgtgagccactgcaccagcctgaagttttcttggccttccttcgttccccaacaacctcaacaacagttctcagctgtttgctagggctgtagaacaaagttccatagactgggtggcttaaacaactgaaatttactgtctgcacaattctagaggctagaagtttgaaatcaaggtgccagcactgttggtgccttctgagggctgtgaggaaagggtctgttccaggcctctctccctgacctgtggacagccctcttctccctgtgtctcttcacatcatcttccctctgtgttcgtgtccagatttcctcttctcgtaaggacaccagtcatattggactagggcttaccctgctggcctcattttaacttgattgcctctgtaaagaccctatctccaaagaaggtcacattctgaggtactgaaggttaggacttcgacatatacattttgggggaacacaattcaacctataaaattcagaaaagactctaccccaaaccagcagaacttagcaaatagattgattgacccttaaaagaattccatttactggaaattcaccctcagttggagaaggcacaggtgatatcaaaagcctgtgttatgatgggggagaaaatcttgagtgctgtgcttctactacagctttctgcattgtaagttgagtaacatgaggctgtgtgcggtggctcttgcctgtaatcccagcactttgggaggccgaggcagggggattgcctaaggttgggagtttgagaccagcctggccaacatagagaaaccgcatctctactaaaaatacaaaattatctgggtgtggtggtgcatgcctgtaatcccagctacttgggaggctgaggcaggagaattgcttgaacccgggaggcggagattgcagtgagccaagatcatgccattgcactccagcctagacaacaagagcaaaactccatctcaaataaataaataaataaataagtaagttgagtaacttgctcagtaataggaaaaggcacctgacagggtagaaaaaacatggactttgaagatagacatacttgtgatcgaattatgacctcctcccttactacctgtggcattctgtggaacttaaccttacaaatccccctttgactgtaaaatggagagtataaagaggttgttgagaggaataaatgctaaatgtatgtaaagttcctggaacataaggaatcaagaaatgttaggcccatctttctttttaacctgttaagagtattttaaattactctgaaagtctttccctagctgcctcttcaaattcaggtggcctctctgtcatagctccaggcttgtccatagcttatgagaccagacagtgacttccctatgtttacgtctcatgttcagtttgttttgacaccgattgaagttgccattgaagacatgaagaagaagaccctgcagttagcagttgccattaaccaggagccgcctgatgcaaagatgcttcagatggtgctgcaaggctctgtgggagctactgtaaatcaggtaagcaaaaccagaggtggcagctcctctggttcttattatttaggttgtcattatacgtctgcacccttcttccttggggttgatgaggactttgatccatagacaaacacagaaatgttcctacacttaacctgaacacctgtaaggtttagaagacttttaggaaacctcttccctttcatgtaacaaccccaggtaaaaaagaaatcctagagatgagtggaccaggctttaaggagtaccactttctcagaggagtctccacttcggggccagacctgacaatatgatgcaaatctggagtcatgttgaagaatgcttagtcatgaccaattcacgcagagtaattgcagggcttgagactcacctacaaatgcctataggagagaaggaaaaggatctagaacatccaactcttggctcagtcagcagatgaacccagcatgccaaggaccttgacaaccaggaatgacctgggacctgacttcttaggctacttcagacaagactagatcttcctatcagacttcttagaacgctgactcccaagttcagcatggtgctcaagcagtctcagatgaagggaggtaccagcctaatacctctgtccagtgggcctccttaattcaaatctagatctgttcttgtccacacttccacggcagttattcagtgagcatcatgagtcttttctcattcagcgtaattggatttccccacaaaagttctgagtgtacttgacatcaagggagcagaaacagagaagagaaatgcctattacattcccaagatcaggaaaaaaaaatgaggaaacgtttgcctttgtaagtgccaatcctttgataaaatggaagactttccaagcccacaaccatggtctatctgtacacgatggatatctctgactcaatccagcagttatgcaaaatgatgtttgccatgaaggcaactagataagtgaacaaaaatgaatagatcaaggcaatcctgatttttagaaaagcaactcaaagcacataccatttgatgtagttgtattacacttatatatgaatgaaaatctattattagtagtatttgattgataaaataatattcggcgccaggctcagtggctcatgcctataatcccagcactgtgggaggccgaggtgggtgaatcacttgaggtcaggagtttcagaccagcctggccaacatggtgaaaccccatctctgctaaaaatacaaaaattagccagtgtggtggcaggcgcttgtagtcccagtacttgggaggctgaggcaggagaatcccttgaacccgggaggtggaggttgtagtgagctgagattatgccactgcgctccagcctgagtgacagagtaagactctgtctcaaaaacaacaataaaaaagaaaataaatttgggctgtgtatggtgcgcacgcctgtaatcccagcaatttgggaggctgaggtgggtggatcccttgaggccaggagttcaagaccagcctgggcaatgtggcaaaatcccatcactacaaaaaaatacaaaaatagccaggtatagtggcacacacctgtagtctcagctacttgggaggctgacatgggaggatcacttgagcctgggaagtggaggctgcagtgagcagagatcatgccactgctctctagcctgggtgatagagcgagaccctgtctaaaaaacaaaaacaaaacacacacacacagggaaaatacatttatacttctgagtgttcctctaaaacttcagattcctcctaagaaatcaaaatttcctgagatgtccaagaccttccttatttttttttgtttatttcaaaccaactacaaaattaaatgttcaaactaagaagtcactccaatattttctcccaagcaatttaatttccttcatatatgtatgaatatattcatatatatgtgtgtgtatatatatatacatatatatgcatatacatatacatatgcatatacatatatatgtatgtgtatatatatatgtgtgtgtgtgtatatatatatatatatatatatttttttttttttttttttttttttcccaccagggaccactggaagtagcccaagtgtttttggctgaaattcctgctgatccaaaactctatcgacatcacaacaagttgaggttatgctttaaggaattcatcatgaggtaagaaggaaaatggctgggaatttcagtagagcagtggttctcaaagtgcaatcttagaccagcagcttcagcatcacctgagaacttgctagaaagacaaagtctcaggcaccctccagacctgctgaattggaatctctggaggtgtggctcagcaatgtgcagtttaacccgccctccaggtgatcctgatgcacactgaagtttgaggaccactgcagcagagcaacactacttgaactactaatgagtaactaacacgtcaactatgaaacgcttttgtggctagcatcccgtgtgcctcacaatcacttgttgtaaaacaagtatcatcatcttcctcattttacaaaagaggaatcagaggttcagagagaggagataattttacttaaggtcacacagacagttggcagcagagatgagctcaaaccaggtcttctgaatccaaatagtccacatgtccatcaatgtgctgatattccactgatgcactagagtcccagaggttctttgcattggcagtcattgtaatgttacaaatcttataatatcttatttttagaaacttaaaaacatacactgcctcaaattgagagaggcaagttctaaaaccaggcttttcaaaggtattatcctgtgacagttccccatgtcagacaagtctcatctctgttccttaattctgcagtggagctggcttcaagagcagtcagttaggaactgggtctttggtcaaagccttgtaatttattgcaatacagacagatatattgggtctcctatggtcctaaaaatatgagtatgaaggatgtgatggcatttcacctataagagaaaaggacttcagaaaaatgtgtagcaatatttctttctattcaaaaccttagagaagaatattaagtataagaatatcttcacttggcagatggggataaaggagactaaaagtttgctaaattcagtgaaaactcatcaaaatgctagcatttgtgaggttagagatatctcctccttcacaggcttttgcgagaggtccgcaattttgctgcatatacaggagacacactgtgccctgcagtgaatcacagccgcttggtaataggatgtttgtgtggctttgcgtgtttgtatttgtgcatgtgtgtgaacatactcacagattatcttgattaatgttttgatatttgaattgtttcctgtatttgacaacaattctgacagaaaaactagttgttgttgttgttttttcagtacataatacgtatcttttaaaaggctagaaaaatatttggggaattattttattattttattttattttgagacaaggtctcactctgttgcccaggctggagtacagtggcataatctcagctcactgcaacctccacttcccaggctcaagagattctcctccctgagcctcccaagtagctgggactacagacgtgtgccaccacatctggctaatttttgtatttttggtagaaatggggtttcaccatgttggccaggctgatcttgaactcctgacctcaaatgatccacctgccttggtctcccaaagtgctgggattacaggcatataccaccgtgcccggccctattttttattttttgtggagacagggtctcactatgccgtctaggctggtcttgaattcctgggctcagagattgggggcttaaaaaaattttttttcatatatttttatttaaaattcattatggttgaatgcttccaaagttgactatgccccaggacctctaaaaggacctatgaaatgtttgaagagcactcactatattccaggcatgatattagttatgggactacagagatctggcttgttcctctgttcttaatgacaggacatagccctgcatggctgaataatagaatgcagcatatgcacagaactttaagaatgactaactacaggactataaagatcagaaaagagaaatcagtttcaggctggagcatttgtgggaggcgttatggaaaaacaccacttaaatcttgtcttgactatatacgtggaagaaaggcgctagtggggaagagggagccaggacagtggccctgcctgatccaaggtatcactttcagctgctttagttacccatggtttgaaagtattacttacaatatgatattcagagagagagagagagaccacattcacataacttttatttcagtatattgctgtaattgttgttaatctcttactctatctaatttgtaaattaagctttatcataggtatgtatgtataggaaaaaaacataatatatgtagggttcggtaccatccgcagtttcaggcatcccctgggggtcttggaacctatccccgagaatgaggaggactgagtaccactgagtggaccagcaggaccacgagactctgtcaggaatgcctgtgatgcaccgggttcctctaagtccagctggagcagcgtgttctcatgagcatgctaggacaaggaggaaagattggaaatatgataatatcagtaaatgaggctctgaatacaatttaaatgtttaagaaaacttgtcaggagagtgattttcatttacttcagtttgcctcaattttttctactagttataaatcttgcaatccagtatctcacgggtatgatcctttccatgacaccacctaggtaaaatgtacttacaaaatccctactaaacatgcgtttctcattagctcccagccccaggaaaagttactccaaaaagaaccagtgcccagtaaaactagtcccaggcaagagatacaagaggaaatggactttcctaggggtcgctcctttaacaaagtcattagagtttcaataatgaggctatcattctccccagatggcctacagaaatgttggattttcaaaatcaaattcaccattttaaagttgttctcctacccttttaatggtgattccacatgggaaccagtcccacctttctccccactggctgggctgctgcattgttctaggaggccaggagactgtccatgcttcccagacttcactgttcttacacgtcacctgaggatttgtcaaaatgcagattttggcctgatgcagtggctccgcctctaatcccagcactttgggaggctgaggtggaaggactgcttgagcccaggagttcaggaccagcctgggcaacatggcgaaactctgtctctttaaaaaaatacaaaaaaatacaaaaatttagccaagcgtggtagtggtgtgtgcctgtagtcccagctactcgagaggctgaggtgcgaggatagcttgagcccgaggaggtcaaggctgcaatgagccatgatcgtgccactgcactccagcctgggtgacagagaaagaccctgtctcaaaaaaagaaaaagaaaaatgcagattctgattcagtaggtctggggttggtcctgaagcactgcatttctaacaggcccccaggtgatgctgctgctgctacactggaccaaactttgagtggagagcctgcaaagattgcttaatttcctccctttcacatttctccctattacctctccctccttccctgagggcttaatctcttaggccatccttatcatcatttaccacttttgccgtctgcttcctcccaaaaaataaataaataaataaataataaaataaaattttaatggcaaaaaaagaagttgtaaatctcaataaaattatgtgagaacaaaaaaaaaagcaaacatgctcaaactgctgcaccttgaaccaactatagacgtcagttcatccattcattcagcagttattgagctcctactttgtgccaggcactgtgctacatatgtggaaggatgaagtcccaatatcagtaggacaaggctacagacaaaacagtactgctgctcattattcatctctatgtgcaaacacaacagatggcctgccctccacttcattctacagagatcagaagtcgtgggtgagagtgtgctgatggtgcacaactgtgtaaattactaaaactcatcaaactctaaacataaaatgggtgaatgttacggtatgtaaatcataccctgaatacagatagtagatgaggttcctctgttgcttaattgcttctcaagtccaatctggaagttacagcttttaatgaatagagtaactattttttcacgttgtttgtgctgtgtattttctcctccactctgctaacagacagcagaggtgacgcagaagtggaaaatatttggggcttgaacagctctcaggtttcccctttagtaagctccagcttctcagcagacttgggctgtagatcgataagcccagatttccaaggtgaccataaatgagtctctgttgctgagagctaatagcggaaacatttgcttgccaggtccactgcgtctagtgccaccacggggcagcgacctttctgactcagctgtagtggaagcagaaacagccataaagaatcctggcagcctgatttgctgcagccagtactcatccagccagtcctgcaactcttcaaactgttaccaagctgggacctcaatcagcttctgtcttttcctgcaataataaaaaacatctcgggttcagaagccaagacaagaagatagagagatacaatcttctatcttcctcttctgctcccccaaacaccccgaccatttagatttttaaattttcttctttatacttatctggactttctcattcttataaagactaagtgatgttaaatttgtttttaatttaaataaaagatagtagtactcactggcaccagttacagcttgcctttaagagaagtagtttcagatacaccctgaaagggttctgcagcatatatgtggtcataggctcagaaaacaggctgttgagtggtggcgtttttaaactggagttggggtctatgaagaggaaggagaaggaatttgtccgagtagccaaaggacaaccaaatgtgtagagtgtaggtggaaaaagaagcagtagttttaacttgagaccaaggccatatgcctggcttatagctggaaatggggaaatggctttcctaggcagtatatgtggcgttggggttgggaatatgggcactcaagccagattgcctgagttcagatcccattctgcctcaactagatgtgtgaccctgagaagttacctaccctcggtttccccagatgtaaaatcggaataataattgtacctctcccttgcagttagtgacagaataaaatgagttaatacatggaacttagaataagacttcatacatactaagggatcagtaagtgtaacattgttcagtggggcaaataggggactgatggatttgagtgggaaatagagaattaatctgacttaaatacggagattgtctatccatgatttgtctgtctctataaagtttgaatcataagacacagtgatgctgatgagacattggcctgggagcagcaggattctgggtttatatccagctgtgctgtcccacaggtatgtgactggacagggcacttcacctctttgcatgttagtttcatcaactatgaaataaagagactagaatacagcatctctaatagtttatcattctcatattgtacaaatagttcatttacttagcctgggtctgtcaggcataataacgctaccatgtgctctggcttcagctgtgtgcagggactcttctgaacatttgatatgtttcaactaatttaatctttacattaatttatgaggtaggctcttatcacccacacatcacagatgaagaaactatgacatgaagaggttaagtagcttgtttaaggttgcaaagccagtaagcagcaaagcgggattcagagttgagcactctggctccagagtccatcctcttaattgccatgctgagctgttccctctagtgactatattcagttgctagtaacagaaggaagagtagcttaaataagaaatttatttttctctcacattaaataagattggaggtagtcgatgtagagctgtgtagtggcctcataaagtcatcagagaccctggttcttttccaatcctttgccatgccatcctggttctagtgtacccattctcgtggtcatgatatggttgctagggctccagccatcatgaccacatctaggcaagtcaggagtagaaatgaggaaacagcaaaaagatgtgcccatttcccagtgccttcacctatattatcagcgatccctacctgcatgggaggctaggaagtgtaagttttcaggtggtcacactgcctggagttctgccagtagggaagaaagaatggatattgagaaaacaactaacgaatgtttgtctgccacactgaggaacccatgtatgggctgtgctgaaaaaggggggccaaggctgggtacagtggctacgcctgtaatcccagtactttgggaggctgaggtgggcggatcacttgagctcacaagttcgagaccagcctgggcaacatggcaaaacctcgtctttacaaaaaatacaaaaaaaattaaccgggtgtagtggcgtgcctgtagttccaactgctcgggaagctgaggtgggaggatcacttgagcccaggaggcagaggttgcagtgagctgagatcatgccactgccttccaccctgcatgacagaatgagatcctctctctaaaaatagagggggtaccaagagatgcagggggggtgagggcagcatgactactctctctgtaggagaccttaactctataaatggaggccccaaaatgttactgccatcaaaagccaggaatccttttctggaggcgtaacttcctgccctttctaatccctatcaatctggtttctgtagaactgtgactgctagaaaaccccaggcatatttgttctaagaaaatacttgtgttcggtgaatttaccaacaaagggagcatcagaggatgtgagggaagtctggaatggttgtatcactaagtgagagcagcacagatgtttgtggacctattgagaatgttacagataagaccatttttgaaaagttgtttgcagtgtcattttatgatcttgtgtacattttccaagcgatgtggctattctctaggagggatagtagaaattatttcaattttaatcaaataacctagagaatataacccaaatgactgaaaggaagaaatgtagaaaaagtatataaaataattttttgcattataaaagtttaaagacataaagtaatattactacataaaatctaagttttttactccagctattaatatgtttttctttataaaacatcacatttattaattgctgtgtaacaaactacctcacaatttagtggcttaaaagaaaatttaattattatgcatgtggtacataataatttttgctttcctcatttctactcctgatacttgcctatgatgtggtcatgatggctggggccctagcgaggtgtattgtggccatgagaatggttttgctgcaacttggggttggctgggctcagctaagcagtttttgcctggagtctctcagttgcactgagacagtgactaggacttgaattacctgaatgcttcctcactcatgtctggtgtctgggctgagaatactcaaacagcaggggctcctcctctctctaactctccttctctccacatggtctctcctgcatgacagctttagggtaactagacttgtcacaggatggttcagaactcttatagtacagaacgagagagagacagaggccatattaccttttattagccagtcacacagtaccacctccaccacatcctattcagtgtggctgtcacaaagaaccatccacctcttgatgggggcatgggcaaggttctaggagagcacattcttgtggccattttcagaaatacaatctgctacactccagaagcatctgtttgccttattatcatagcttctgatttaattctcccagcaaccctaggagattatatgagcttattatccccattttccagagaaaattgaagatttttatggttaagtcatcctgctaatgagtagcagcttgtttcaaccgcagttgtctgcatataacacatttaactcagtcaagggcacatggtgagcaatcagaaggtgttagctagctgctgctacttctgcaaacaaagactaaggagagtttagctgattttaccaaagttgtccgagtagacttccccaaattagctgttagctttggcaggactcatcccacctcctgtagcctgccaatgttataaacttgggccttgaagtcatcctgaaactgatcttattttacacatggtggtaattgtaactgttagttaagaagcaataaaaaaataataaggggtgatatagatttctcaggattcaaaggccatatgccttcccttctatttcttccctaaaaccgttaattcataaccttagctatcctataatttgcttcaattaatgacaaacataaaagataggtgaaaatccagttaagggagttctttcagattctgtgtgagttaaatcaagtccttcttctatagcaggctaattccatgatgaagctgtggtgctaagtttatttttgcctaggcaggtagctcttccttgccacatgctatcctcttcctctttgactgtcatcctgaaaatgtgttcagtgttaagaggatttgataacaatgtctgggtatctccataacttagtccaaatctggtaccactgttaggaaaataatgtaagccatattgatcacccacgtcttattcatttgaaggataatatagttattactaattattgcgtgttaggtaacatacagccattattctgtccctttaaggtttattgatttgtaagttcccttgggtagaagagtacaaaacaaaaggcaaaacttcatcatgtttaaataacgtgattttcttctttggtgtgtaccgtaccgtgcaggagacagggaaaacaccaggtttaacggtccacaagccagataaccatgatgagttctaaagattttctctgtctttaatgttcttcagttttgtcatgagaagactggatatagctctgttgttgttcattagaggatttatatctctcttcaactctagaaaattaccagctgttatctctttaaatattgtctccctctcattttccattcccttggagattctattagatgtgggttggatcttccttatatctctatgtttcttaaccaattttttcatatttttttattttttaaatctcattggtgatttccttggatctgtcatacatttacttctccaattatgtctagtctattatttaacctttaacctttccattgagttttttgtcttttagcaactgcatttttttttttttttttttttttttttttggtgagacaaggtctggttctgtcacccaggctggagtgcagtggcatgatcttggctcactgcaacctccacctcccaggctcaagccatcttcccacctcagcttcccaaatagctgggactgcagtcacctgccaccatacccagctaatttttatattttttgtagagatggggttttgccatgttgcccagtctagtctttaacttgtgagctcaggcaatccacccaccttagcttcccaaagtgctgggattacaggcatgaggcaccacacccagcctagtgactgcatttttcttttttctagaagttctgtttggtccttttctgaacttttcctggtctcttttttcattttccctgtttatttgtttttatcatggattttataccttttatttattttctttttttttttctagttacatgattacttaggattttatacattttattacctctctatattaactttggttttttacattgttttattatctctaattcttattggactaattcttttgtttgatgcatctgttagttttccctcgtggtggttggtttcttcatatggtttgtaattttttattgtgagctcatctttggcgagagtggctcatatgccctgattgagaatgtgttcctccagaacaactttatgttggtttggctgaatcctagcaatttcagtaatcttggactggcttttaagttattttctcaccttgaagcacatacagtcaaggaatgtacatttgtaacttatactatgtgtggtgcaagcctagaatttccatttctcaatatgactttcttttccataaatggccctaagctgatagcaagttttcattctgcctctctggacatcttgcagcatttttctaaaccctctttcatagatgggatagcttttcaaggctctggacgatatgcaggtggcatatccagaatctccctttgccctggccaaggccacatcactaatcttgtgtgagctttgaagccccttcccctcagcccatagacctatacacagtcctaaaatcttaatgggcagtcctactgacagctgccttgtcaccagctcctgtgatcattctagctttgatttttctctttctttctggcacctggtgttcccctttctctttcaacaagtttttgctgtgctttcctagcacttccatatgtacgtagcaggaggaggctgaatgccatctgctctgtctgccatgttgctgtaaatcacagtgagttttttgtaagtgtaacagcttccattctgcagtgtgttttgagtctgactcttagatccatcacttcctcacagtgttatcttgggcaagcatcctaacatttctgagtttcagaaacaaaatagagataaatgctgactttttagggttgttgggaaaattaaacagataatgcatgtaaaacttcttgaaacttcttctggcacatagcaagtcagaggttctcaattctggctaggttggcttcagtatcccctgggcaactttttaacattagacatttctgggccagaagcaatggcccacacttgtagtcccagctacccaggaggctgaggtaggaggatcactggggcccaggaggtcgaagtttgccatgagctgtgatcatgccactgcactccagcctgggtgatagagtgagccccgtctcaaaaaataataaaataaggtaaaaaaaaaaaacaaacacagagatttctgggtgctacccctcagcagttatgattcattaagtctgagatagatcccagaaatctgcattttgaaaagctccacaggtgatcccgatatgccacccagtttgaaaacgttcttaaagttattcgaaaaatcgtaagtaatttcattgttctcagatttctaagcacttcaaagtcatttatttctcccacactgatattttcatctcagatgtggtgaagctgtagagaaaaacaagcgtctcatcacggcagaccagagggaatatcagcaggaactcaaaaagaactataacaagctaaaagagaacctcaggccaatgatcgagcggaaaattccagaactgtacaagccaatattcagagttgagagtcaaaagaggtaagaacagggcagaggaggcctcttcctgtgggataaagagcagcgcatggggcctagcaccttggggcatgctctgctgcacttggggagctgcagaacctcgaaagggtggaagagggtcccacagtcagagaggctaccagagtgtgattcattctgcctctgtcctccccatccctgctccttgacctctcccagacaccttggtgttggtcttgtgccagggtattcccagggctgaatgatggcctgtgttggtttttttgtttgtttggttggtttgtatgtttgttttggcacagtgtgaaggggtcgcagacctttcacttattatttgctgagttgtccatgactgatgtccatttctactgggtgatccacccccaaccctttctaaaaggctaactgatcttttcttgcttctgtacgctctctttccctctcctccctctcttttcttaatttcagggactccttccacagatctagtttcaggaaatgtgaaacccagttgtcacagggcagctaagaaaagccatcttcattcgtggagactgtggccctgcaaccctggagaaggacttgctggtacttaaaaaatgggacatttgccacccaggactgactgtacactccctgatcagccagcactctggaagctttgggatcccaggaaccatggaattattcccaaatggactctgaccagatttttgccatactggggggtggcgggatggaggatgggtactcaggcatgactgcgtatttattaaagtgtgtttttccacaatgtaccaaacaaggcataagcagcttctcctgctgactggccaatcactgcccatctgagagatgatttcctctggcccatatttgaatttattggagtaactcaaattgcctgaggaaaaatggaaaaattatccaccagtcgattcaaactgaatttcactctttataggaaggcagggcaaacttgtaggagtacgaaacattttcaataaatctacaaagggaagccttactacaattccaaaaatcatcatggttggaaatttgggaggagattatttgtgaacttgttacccttttggtaatggtggactaattgctgtatagttatttttgttttattattactgttacattaatttaacatgcatttatagaagaatacattcaaagcactgatgtaggagatacacggtacttggagcagtcagccagaaatcacagatactgctttcacttaaatggaaacaattctccgataatgctttgctttttttcttatgtcactcttgtgtactatctatttttctcctctctgggaccaagtttctttttataaagcaataatatctctgttttcatttcagaacattgtgctgtctgtcagcatatgtatatcagctacaaaatatattcaactttgacttcttttgacaaaggactttaggaaaaagaggaacaaagacattatttgagaattaaattatatatttttaatatgactgtgaccttgactgataataaagatgtaataagaattgcaagctaaatgtt

SEQ ID NO: 15557 - DNA, 192212 bp, Homo sapiens
cattttgtctcctgtaacaatttacgcgccgtgtaactgtgaatctttcaaaggtatgttttactggagtgatttctggttatttcagaaggataatttgtgtgttgcgtcattaatgaaatagtagtacgaaaaacctatagcatcttttactgcaggaggtaactttccatgccattttttcagaaaatctacttatgacttcagtggcttgctagactggcctttttatttgtacttttcctgtgtttcagaattgcagagtataataaaggcatgtcaagtgcatattgtgtccattttcaggtatattagataagctttacaccaagataaattagatatgcttattggtttaatttgtgctaatatatatttaattgaaaaatcaaaaaaatttttttaaattgactgaagttgtattccaaaacatgcaaaatttagtttaaaatagattggatacacttttaaattttaaacaaggtagagggtttagtgctttgcttttttaaaaagtaaatgaaggctgcagctttctgcagtagttgtcttgggaagtagtgtggacatcactcctaagagacgttaaggaagtttagctaacaggctttaaccctttctctccataccagcttttactcttttttttttttttttgagatggagtttagctcttgtcacgcaggctggagtgcaatggcaccatctcggctcatcgcaacctctgcctcctagttcaagcaattctcctgtagttcaagcaattctcctgcctcagcctcccgagtagctgggattacaggcatgcaccatcacatctggctaattttgtattttgagtagagacggggtttctccatgttggtagggctggtctctaactcctgacctcaggtgatccgcccgcctaggcctcccaaagtgctgggattacgagcatgagccaccatgcccggccaccagcttttactttaatgccacagccttaaattttctttcaggagaaattattttatgtaaagttacaaaggaaaataatgcttaatatctgtaagcattcgtttggtaagtttgctgcctcctcagtaagttttgatgaaagtgaattttgatgaattactaccttagccgggtagtgacgttaacatgtggcttagctgtccattttctaagatatcaagaaaccagcaacaataagtaaaattgttaaattatgcaagaatcacatgttcctacctgtcatcatttagtcttggttctatttgcatgtgaatatcctttagaatatattactcccagttattccgctttacttttctgaatctcttttcccatctcttgacttcaacttcagtatatggctcttgttccttctacctggagaacggaggcatgtggaagcccagaggattgaattcttttttttttcttttctttcttttctttttttttttttagatgaatagtctgcttaggaaatccatctccataatgtttacctggtatcgtgttgtaatgtcagaatgaagtggctgttcttccccttgagtcatcgtcccgaatgaaggttccccaaaagaaatcatcaacttatgtggtgatttccttttacctttaaaaaaaaatttcttttcatggaaagataatggaacatgtcggtaagattcatttctaggaaggcaaaggagtagtttatcatctaaagactctcaacctaaagctgttttagaaaactttccttaaaatgagaagccgtaggttttcgttgcattattttggctaattgaaaaataagaccaagtgcgttctgaccttcgtttctcttacctttatttttacaaccaccatttcaatggcccacttgctgatacaaatgattgtttaattttaaaaagcatttaattgaagtcaagttatttagaacctaatcatttacacgtctttgttgttgctgctgttttgcaagagtgaagagcttggagtcaggtgaatctgggatgaggtacagttgtcatttattagtcatgtaatttgtgacaagccacttaatctctctgaagacttcagtttcttcatttgtaaaattggcataataatgctgtccctagtagggaatatagaattatataatgggtcctttgtatatattggctagtattgctctcttacgatttggcactatggagacactgtgggagattaaaagaagatgatgaataaaaggtgacttcagctctgaagggctttatgatccatttgggagaacaggtaatgtagaatatactggcttcaaaagtggcaggtgtttagaagagaaaaggatacatgatgtgataggaggcaaaggcttgattgagaaggctgagaagacttagagtaagggttctcagccctgactggacattaaaattatctagggacaattcaatcagaattcctgggggtggggaccaagcatcagtattttaaagttccctggggactttaacttgaagcccaggttgagaatcatttaaacagctctgttatttatttatttaaaattttaatgtattttttgagatggagtctcgctctgtcacccaggctggagtgcagtggcgcaatcttggctcactgcaactcctgcctcccaggtccaagctattctcctgcctcagcctccccagtagctaggaatacaggcgtgcaccaccacaactggctaatttttgtacttttagtagagacagggtttcaccatgttggccaggctggtcacaaactcctgacctcaagtgatccacccacctcggcctcccaaagtgctgggattacaggcatgagccactgggcccggcctagttttactttttttttttgtaatggaatttccctctgtcacccaggctggagtgcagtgatgtgatttctgctctctgcaacctctgcctcctgcgttcaagtgattctcctgacttagcatcctgagtagctgggattacaggcagctgccgccatgtctggctaatttttgtatttttagtaaagacggggtttcgccatgttggccaggctggtcttgaacttctgacctcaggtgatccgcccgcctcggcctcccaaagtgctgggattacaggcttgagccactgcgctcggcccatttaaaaaaactttaaaggtagacgtattccaaatggggggaatatataaagaaaggtaacacttattttgccctgtgtgctttgaatttcagaaggtgtagtaagcaaagaccacttactaaccctacagatatatccttagaaaatacagtggtttctgtcataaatctgataaatcagatgagaggaagggtgtatgtttgatgttgatttttctttttgttttattggggtttttaaaaactataaatatcaggtctgatgactatgtgtataaacattttctaagtagataaaatattttcaaattttgcattttttagtatgaaggggatccatcatttgaagttggttttctagatgtgatgataaacttgtcccaggtctatttgacactcctaccaaaatcctttgtgaccagggctagaaggcagctgtggctagtaaataaccctgtgtgtagactcacttattggctttggcattctctattgccacagctgtgtgaatagattaaccagagaccctctggtgccagccacctattcaggcaaacaagtctataatcagtacctctgttaaaatgaaactgtaatatactattgtcttttcatttatttatttatttatttagagacagggccttgctctgtcgcccaggctggagtgcagtggtacaatcttggctcactacaacctccgcctcccaggctcaagcgattctcctgcctcagcctcccaagtaactgggaccacaggcgcaccattgcgcctggctaatttttgtattttttttgtagagacggagtttctccatgttgtccaggctggtcttgaactcctgagcttcagtgatctgcctgccttggcctcccaaagtgctgggattacaggtatgagtcattacacccggcctattttctgattgttcaaagtagaagccaggcacaatggctcatggctgtatgtaatcccaacaatttgggaggcagaggcaggaggatagcttgaagccaagagttcgaggccagcctaggcaacatagtgagaactcatctctacaacaaagttaaaaagaaaaattagccaggcatggtggcacatgcctttagtcccagctacttgcgaggctgaggcagaaggatcacttgaactcaggagttggaggctgcagtgagccatgattgagccacagtactctagcctgggcaacagagtgagaccctgtctcagaaaagaaaagagaagagaggagaagagaaagagagaagagaagagaagagaagagaagagaagacatacaaaagaagagtaacatacaagagaagagttaggagaccctgtctcagaggaaaggaggggaggggaggcgagaggacaagagaagaaagagttaggatctatgccctaaggaagtaaggaggatttgagactgtgtaggtggttaataaccttaagctacatattttatggagggaaaaatcctatttttaaaagtgagaatagaacaattttgaagtgaaatggaatgaattagctggaccataacggctctgactgaagaaaaggatgtaaaaagccacatcctggatatgtaccaaacaccatggttacatggcatgtttgtatatgtaacatttatttaaaaaaaaagtctcatagcttagaaggcatttatttttgttatgtgtataggcttctgtgcaataaagcagccttttttattttacagctcatgatgacttaaatggttaattgcctgataaatatggtcctcttttattcttctgattctgttgttcttttgcacttcatctttcaaggggttgggctattcttaggtttcactgattgcactggaagggacatgacggaaaatgaagatctcaagataattttcttgcaaattcacaatggaagataaaaggaaagagtggcaggcattctgcacacagagcagacgtttctttattgtcattgttcagcagaggaatcaactcagccttggtgaaactagagtgatgcccatggtggcatgtcagcatctccctcttagtggcatcagtgctagattgttgttgttggaagcaggagagtgtttagtccataaagtacagaacttcgatatcacagaagctagaagaactttactgccttcagcttcgtttaaagatagtagagagcttactcattcgttttagaaatatgtattgggtctctatgtcaggaactgctggcacagcagtgagattgaagatacaacagtgaatacaatagagggcctatcctcatagagtttgcctttcagaatgagggacagacgcagacaaatagaaaatgtcgattgtgtcagggagtattgagggctttgaagaatgaaatcgtgacccagaagagatgcttttagattggatcatccgtgaaggcctctatctagaaaggagacacttgggcagaattctgaatgaacttgacggacatctgaaggaaaaatattccagtcagaaggaacagtacgtgcaaagtccccaaaacttcaataagtgacgtgctccagaagcagcaaggaagcagaatgaggcctgaacagagtgggcagtaggaaatgcagtcatagagaaagcagggctgggtcacaggcctcagagactgtagaacattggctcctactctaagacaggaagctgctgtgagcattgaggttgggcgtggaaccatttgactttttatgaggatcactctggctgcagtgtggaaaatagactggacgagggagggcagttaggaagatgtcacggtaactcaggaaagcaataccggtgctttggacgagggtggtggcagaagagaaagtgagaagtattctggatatatttcagaagaaagtggataggattttctgatgggtgatatgtagagtgtaggagaaagagaagaagcaagattgactttaatgttttccacctgggcaattggtggactggaattgccacttgcagaagtgtggaggtatggaaggtatgggaagagcagattgccaggaaagttgagttagttttgaactcattgtgtttgagaggtctgttaaattatcaagtagtgatgttgaggtgtaattggaaaagtcaacctggaatttatggcagaagttgaggctgcagatataaacttgtaattttaaaaatgtatatttaaagccatgggagtgaatgagttcatttgagattgaatgcagattgagaagagatttagaattgaactccagggcactgcatagcaggaggaaaacctagtaaaagtggtatctgtaaaatagaggaacgaactgtcacaatttgcctggtactgaggattttctcagtacatgagactttaagagactgggacaccctgagacaattggttgccttccatgggaagaaagtatgtcaagagggagagagtgaacaactgtgtccaataaaccaggactgagcaaaaaccattgaatttggcatcatgaagtcttaggtgactttgacaaggcttgtctgttgtgaacagccaagtaaatgtgaggaccactctccaaaaggtaaagaaacatgcatgaggatacaggtgcgccagctggagacatcatgcctcttccccgtccccaccaggagtggcgtgaagcctccccagtgctgtaacgaggcagccaggtcctgtgtgactgcacatgtgacttggggcaagtcatttaacctctctgttttcactatcctatttgtgaaatattgtttagatttgtggtttgagtcagctatctgtatactacactgtgttaggagctatgtagattaattttcaacagatatggttctggggttgtaggaattttcaatttgagaacaaattgaatcttaccctttgtcaggagaaatagcctttgacatgtgttaggggcaagggaaatctcaaacttgcttaattttaaaaatgaatatttggttgtggataatttaagctttggtgatatttctaattattttttgtgtgtttctagtctactgaccagaagtctgaaaaaaacaactaaaaagaaagactgcataagccttcactagagaagtattgaaaattgcttgagggaagtgacggtttctttagcctagtgtctgtaggaccccagtgtagtgtttgttgaatgaatgaaaggaggcgtatcagtcaggttcactcagagaaacagaagctgtaggaaatccatatggatgtgtgtgaaggtattggcttgcctactgctggtgtgtggctaagcgagcttaaaagtccgcagggcagatagtcaggaaggaaatattcccaacagactgagctcccttgggcacaagctgaagcctggagtctgaactgccagagagcctctaccttcttagaaaaggcttcccactggctaagtcaggcccacccaggggaatctctcctttgattaacttaaagtcacctgtttagggactttaattacattggcaatagtcccttcacagaagcacctaaatgactgatgatgtaactgaaaaaatgtgtgtgtatgctacaaaatggctgcagtctcccttctgtcctccagctcttgcaggagaactctcttgtagctcaccctgtctgaaaacatactggaaaggaattcaaggaaatgtagttcagcctagccacgttgacacatcatgaagccgtcacaaaaggtaaagcctggtttaggagcatttgcatttgcagtcttaagtatttttgtcttatttttcaaaaggggttgggcacggtggctcacgcctgtaatcccaatactttgggaggccgaggtgagtagatcacttgaggccaggagtttgagaccagccaggccaacgtagtggaaccccgtctccactaaaatgacaacaattagccaggcgtggtggcgcatgcctgtaatcccagctattcaggaggctgaggcacaagaatttcttgaacccaggaggtggaggttgcagtgagccgagatcccgccactgcagtccagcaacggagtgagactctgtctcaaaaaaaaaaaaagtagttttggtttttaatttttgattttttcttatgttattacatataacgaatgatatgcatactctgaaaaatcatgacataaaggtgaccttgaaattactttgatgttcatttaaactagtctttggtctccactggctaggagaccacatatagcagaacagcagagaaagcaaaacagttaattttcatgtttggcttttgagcttccagggacccaagtcttgccttgaaccgatcttaggaaattcctcattccctacccgaccctgtttctaaactgcatccctgctgaaatgcaatgccactgtaactctctccaatatttgttttcttctttggcttaccactagatgtatgtatatatgtttgtgtgcctgtgtgtgtgtgtgtgtgtgtgtgttgactgcctcatagtaaagcctactcttgagattaagactcctgatagtttagagaacagaaatcttttttagttcctggttattacttgaatttgcaagaggaacaactgctaggaggcctagttaacagtagttagggtctccacccacttgccaagggcaagactagtttacaccacatttggaatgaccagtttcctcccactttagtttcagtgtagaaagagtaggggagacgaactattcaatgtcagcttgggtgtagtgccagaaccgtactcagtaatgctgtcattgctgttggtgcttaccagctcttcagtactggaatagcttcagacctcgagagtttatgactttatcatcaactgggtgtgttgcccttggcacattgccacacagtgcttaatgatgatatatgttctttatcaaattccccccaccaaataatggcattatttacgtgtgagaaagttgcacatttcaccacctcatggtttattagagtgcaattccgtgagaacaactgcctgtgatcctctgtatccccagtggccaactcaggagctcagtatgccctacccagtagatgctcagaacatcattgctgagtgaggaagtcagccatcattttctccctggatagtctctcctgtagataacaggggccgttatcagccaggtttttcatcatttgtggctttgaatttcagggacatgacaagtttgctttttgtttcgttttgttttttttttttttttggttttctagagacagggtcttcctgtcactcaggctggagtgcagtgatgtgatcacagctcactgcagcctcgaactcctgggctcagtgtttctcccatctcagcctttggagtagccagcagtataggtggtgtaccaccacacccatctaactttaaaaaaaaaaaaattgtaaagacagagtctcacttttttgcccaggctggtctcatactcctggctcaagcaatcctcctgcgttggcctcccgaagtgctgggactgcaggtgtgagccaccttgcctatccaacatgacaagtattattctctggcaggaagtgaaattttttctcactgatgattgcacacaaatgtcatatctccatgaggcttctactcactagttttacggctcatgtcaccttgcttcaaactatgcttcagtataattttgaagtgtatatttccattgcctctccttgagtaattgatattcttcacaataagtttacatttattatcacttttatttacttactattattactctgagcagccaatcttatgagaagctcagagtggaacgtgtgggtcctggtaaatatattatttgactcacttccaaacacacttaatattgcctggtgttttgattatttcaaaatatacagatttcttgaaaggcctgcaaaaggaaacaatcaaaattatagcggttaagaatgtgagtctgccttggtttgaattccagatgggccagtccctagctgtgtaatcatgggaaaattattaaatctctagcctcgctttcttcatctgtaaaatgagcatacaggctgagcatccctagtccgaaaatgcaaaattcaaaatgctccaaaatctgaaactttttttgtgcctccatgacgccacaagtggaaaattccacacctgacctcacgtgataggtcacagtcaaaacattgtttcatacacacaatacttttttttatttgtataagtttaagtggtacaagtgcagttttgctacatgaatatactgcatagtggtaaagtctggacttttagtgtctccatcacccaaatagcatccattgtattcattcaggaatctagcatccctcaccccctcccatcttcccacctctccaagcctttcatgtctagcattctgtgtccatgtgtacacattatttagctcccacttctaaatgaaaacatgtgatatctgtctttctgtttctgagttttttcacttaagataatggcctccagttccatccacgttgctgcaagagacatgatttcattctttgttatgactgaatagaattattcaggcacaaaattattaaaaatattgtttaaaattaccttcaggctatgtgtataaggtgtatatgaaacataaatgaatttaatgtttacatttgggttccatcccgtggatgtctcattttgtatatgtaaatatgacatgatatgaaaaattcaaaactctgaaacaccaattgaactcaatttgcagtaagaatgcatacctcacagggttatagtgaggattgaatgagacaatcctagtccaatttctttgcacatagtaatgctcaataattattacttaaatgggtataaactttatagtaatgaggttggggctggaaaaaatgcagtttcataatttcctatagaagtcattcaatcctgactctaaactctgtattccatgtggtggttgggtggcgtgggagagtcctctttatcctgtggggttggtcctatggaggtgtctgtggcagattggcagatgcatttgtcttgtgcatagatggtgtctgttgtttcctctggcagagttcaccagtgtcctaatgcaaacttagtcctcatctggctcctgcacaggctgatctctggctcctttagcccctcatggttcctgttgtttcattttcagagggacccttgtaaggactatagtcctctcttcagctgaccttcaggtccccagtcagaaccaagggaaccgactctgtcccttctcatagcacctgaaaaccccgggaaacgaggggaatgctttgctctcagctactgaggttgtcctgtcaccttctcttctgccctcctttgccatggcataggataatgtaagtcagcaatctcattactcggtatatagccagaggaatataaatcattctaccataaagacacacgcgtgtgaatgtttattgcaacactattcacaatagcaaagacatggaatcaacttaaatgcccatcaatgacagattggatgcagaaaatgtggtacatatacaccatggaatactatgcagccataaaaataatgagatcatgccttttgtgggaacatggatggaactggaggctattatcctttgcaaactaacgcagaaatagaaaaccaaatgctgcatgttctcacttataagtgggagctaaatgatgagaacttaccaacacaaagaaaagaacaacagacactgtggcctacttgtgggtgaagggtggtaagagggagaggagcagaaaagataactatgtggtcctgggcttaatacctgggtgataaaataattgtacaacaaacccccatgacatgactttagctatgtaacaaaccttcacatgtacccccaaacctaaaagttaaaaaaaaaatcccagacaggaagtagggcatattttgcctaatttgcagcttcatcctcactccctaacttacgccactcatgtctcctccatcatcagggacagcaagagtggggaggggacgaggcctgccacatctccattctctgatcttatttcctcttgcctcttcaacagcgctttgtctctcctctccagcttgaagcccttactctggtatgtgatttcaaagcgatgaaaaactggtttcgttagtacttcccttggatctgcccttgtctcccatcaaggcagtgcaagtaaagaatccaagatatttgttttgttggtccactggagggtagagatagagaaaaacagtaacttccccaccacccccaacctcccttgggctgatgactccaaagactgccataaatgaacacttcatagagctgctattaatatgacacaaatctacttgatctaagggattcttttactttcttagggtggtcattcctaagtctttggatttcacagaaaagaaaatatattttaattgaggactgacaaaggttgccaactttttatcaattataagaattgtttttataattaccatcaatttctattatttcttttactccccctctttccaactgtggaaggtaaaattgaagagcaaagaacacttatttcaaagtgagtaaatttagctatatgaaaactcagcagattgccctgagtttccttgcgtagctgcagtccagtggaaatttcttccagaccagcaccagtcgccccagtgacatttagaaatcactgccctggattgtttcagccaccgaaacactcggtgttcactgtcagctatgattatatatgaagtgctttcgagaaccaatgtatagcataacttaggccaaaagaaacactgtgcctaaacactcagccaaggagtgttgagtttgcctggatttctggaaaattgtctccgttccctagttcactgtatttgggtaaacaaaacatggcctcggagagcctttgcgggagaaattataaaaattcagcaaagctttgtgatctcattttggatctcctcaggattcctcatcaagttgcaattaaggagagaaaaattccgccttggggtgggattttaattactcatcatgttatgacttgactttctgtgctgcatttttttccatatcactacttctgtgtttgacagctcctccaaagagtcgctccgttttatgccaggagcgaagtacttactaagtcaaaggaaagcaaggcaaacatctactattgcctttgtgcttttaccagaaaactgggtgagaacctccttttccttttccctgcccctccagcctcagttttatgaccctgtggagccagtggactttgaaggacttctgatgacacacctgaacagcctggatgtgcagcttgcccaggagctcggggacttcactgatgacgacttggacgtggtgttcacgccaaaggaatgtaggactttgcagccctctttgccggaggaagggtaaatagttttctaaaatgtagatgtgattgggattgtcatgattgttttcaataagtgggtaggggagatgccttcaatctgaacttaaaaataaaataaaattactcaatccattcaaatgtgtgggacagctatatgatatcatcatgtaagtatagatagtttttaaattagtttggccagagattttgaaaagctatgtgaagactaagccagtgcaagggatgcaggaggaccaaatgaaatgctcaagaggaggttaaaagtgcaggctctggagccagaccacctggctgccagctcagtgaccttggctgtcacatgacctcccaaatcctcggtttctccatttgtaaaaatgtcaagatttttaataataattactgaaatgccaccatccagaagcattttaattgcttacagttatgagactggatcaagttagaaacataaggtaaacccacatttattgagcatctactatgttctgggtactgagataaaaagatgaataagtcaaagtccctcctttaaagaaagtgtcatgcagtgctaaaacagtggggagagctctgtagaataaatatgtgaatagctaattagggcttgagtttctatagttggctcttctatatgtttataggcttgggcattagtttttggcatcaaactaactgtggaattgtagctaaatgaaacgcctgttgcttctaaaatgtaaaaaaaaatgtctctttggaggtttaggataaacttttatttacatttattttaaaagccaaattaagattcatatcctcctggacaggttccatcttctcatcttccccagaaggtcccagaaagaagatcctgacacacagcccctgccctctttactctgagatattctagttctattttggattttatttcatcacagtttaaggaggttggatgataatgggctggtattattgtgaaccgttgctctcttgttcagacagtcctcactcacataggagaactgaccatatgtgtagctctgatgttttaaaaatacacacttcccaggaaagaaaaacattgtcatttttgggaaacatactcccccattttcagtccatttattcaggtatgactttagtataagttaacacctactatttcatctttagtgaagaatcatttaatttattcctttatgtaaaatttatggatgtttccaaatatggtcagaatcttggaaaaagctgtttaaaatgcttacagtagccagtcaccgcagcttgttcctgtggtcccagctacttgggaggctgaggcaagaggatcacttgagcccaggaatttgagttcagcctgggtaaaatagtgagaccctgtttcttacaaaacaaaaacaaaaaacagtacaatgaatttagaggaaggaggaggtttttttttttttgaaatttgataaggaagataatttctttacttagcatcagttttttagtatactgttgccttgtcaaaagaatttataggtaacatacctgtctgatgtctttaagacagcctctactatttcagttgttgccaaaaagtcttctgtataattaaggcaggggaaggtatcatcatcacaccagagtaaacaatagctgactcctgttgaacaacctgtgcctagcccagaactttatgttgagctgtgatggcgtggtagtgaaaaacatgaacgctacaggtgagctgcctggattcaggtccctgctccaccacttgctgtgtgacttggaacaagatccttaccatctcatttttctgcaaagtgagaataatagtaatgcctgccctatggtgctgattgagaattaactgaattaatacatataaagtgattgcctcagtgcataatgcacagtaaatgctacctaagtgtaaactattaatatcatatatgcgtcttattgtgtgccaggcagtcttctaagcactttgcacactaaccgatttaatcttcatcaaagctgtctactaaaaggggcactcttactactctaacagctttaaggagaggaaactgaggcacagaagggttgagtgactggcttatggtcacatagctataagcgatgaagctgggatttgggcaattagggcccagagactgcatgtgtaacctttacaatattttatctaatactaacagcatgtctctgttcttacctccttatcacagatgagaaaattaaggcttgtagcatttaagcctgtttatttctggtactaatgcatttgcaacaatagcaaaaagctttgctacaattgttatttttgatttcaagactctgaagcacttgaagagtattgctcatggtgcattccttaagtagacatgacaggaaccaactgaattaatgatcaccaacaaaagccagtgtttgcaatttcatcaaagcataagacaactgttctttttcctggctttcaaaaaggagaacacgcgtgtcctaacaaggttacacatgcataaaaaatatgtccaaattaccctgtcagagataggtatttatacttattttccttgttttgtattcgaatacagctagttctacctgtcttgtgtctgaatgccttcggggatagttataatttaacatgattctgtataataaagaaaacccacaaagcaaaaaaatgccaacatgtttgtctcatcaaagtaaaaatgtttattgccccaggaatacttcagacatttggaatgattgggcaagaacatcctaagcattctcactgataaggatttaaattcgtgtcatgttccttgctcatgattaggggttgttttgttgttttacccagtaataacgtgtttatttcattttctacctcattagggttgaactggaccctcatgtcagggactgtgttcagacctacatccgtgagtggctaatcgtgaaccggaagtaagttactttttttccactttttgtatataaatattaattttatattgctagtttttaaatatttcttaatactttgaacagttctaggtttacagaaaaattgcatggcaaatagagttctcatgtatgccttccttatccccactccatatcacacacacagttccccctattatgaacatctcactttagtgtggtacatttgttacagtagctgagccaatatggatatgttgttattaactaaagaccatagtttacattaatgtttactttttgtgttgtatattctatgggttttgacaaatgtgtaatgacatgtatatgcctttacagtatcatacagaattgtttcactgccctaaaaatcctctgtgttccacctgttcatcctccctccctggcaaccactttccttttttactgtctccataattccaccttgttcttcaatgtctttttgtggcttgatagctcattttttttattgctgaataatctttcattgcatggctgtaccattgtttatttatccattaacttactgagaaagaaagttctattttaaacataaagaatagactgcaagcttgcccaacccctagcccgtgggcaacatggagcccaggatggctttgaatgtggcccaacacaaattcataaactttcttaaaacattatgaggtttttttttttgcgatttttttaaagctcattagctattgttagtgttagtgtatttgatatttggcctgagataattcttcttccagtatggcccagggaagccaaaagtttgggcacctggaatagagcctttttgttgtcttctaattctgatgaattcccagggggaaaaattaagtgaattgaaacctggcctcagcttcagaggtggcattcgagtttatgaccaagaaataaattacttgctggccttccagtaagggatctttctctcctggattaatcaaaccttctgtgacattgttctgagctttttctctccatgccatggacctggacagcactctctcatgagaaacatctatgcacattgaaattctcagcctgcatgggtgtacctgttggggagtgagatgtggactctctacagattagggcacaccccactagagacacgtcacagaacctttgacaagacattagtagtttaaaattctgatagcctcactcctcctatacctcagtaagaattactattctatggggtaaatgatgaaagactttgaggattgggttttatctagctcctggaagggtgccattgagtttgtgctgaggttttctggagtaatgtcaatatgcacacattttcagcagcagaaaaagagaaagcattcattattaaaagttattaagagaaagttagatgccaatccatcatctgttctaaaatgaatggaaaacaaagtttgctgggcagtcagataaaattatggtttgctgataataaataaaagatttcagaacaagttgttctcaagtttttaaatgctatcattagaggtactttctggacattaaagatctaaaaaaaatctgagaaggaacaaatagaaagatccattttgatacatttggttttcagatttattttctatttcgggcttgtccactttttcatttctcatggcaatgcacgcttcttggagtagtgatttttcttgatcttgcacaaatgtaagagaaaaaaatgactctttttggaatactcgttgaaattttagaaataattatgaaacacaaatcactcagtttcactctagacagataatcatcatgaacatttgatgtctgtcctttgaatagtgttgggtttttttggtatatatttgcgtgaaaactaaataagattataatatcatttttgtaacatgcattttcagttttcacagtaaagagtgattctcttcctttgctattaaatatgcttcctcaatacaatgattgatgattgcataatatatttataccaaaatttatttaaccaattttaatatttaggtgattccttccttttcagtgttgtgcttaaaatgcaaaaacatccttctcaggaaaaatttgtacatatttatgatttttttctttggaattaattcctacaagaggaatttctatgtcaaaggatatgcacaaatttaaagatttggaatactagatcaaacattatgccgggcgcagtggctcacatttataatcttactcagcactttgggaggttgaggtaggaggatcccttgaacccaggagttcaagaccagcctaggcaatatacagagaccccacctctaaaaaaattttttaaaaaattaactggatatgatgacatgcacctgtagtcctagctactcgggaggctgaggcaggaggatcacttgagcccaggaggtcaaggctgtagtgagtgacgattgcaccactgcacaccagcccaggcaacagaggaagaccctatctcaaaaaaaaaaaaaaaaaaaaagccaggcacggtgctcatgcctgtaatcccagcactttgggaggccaagacgggtggatcacctgaggttgggagtttgagaccagcctgaccaacatggagaaacccagtctctactaaaaatacaaaattaaccgggcatggtggtgcatgtctgtaatcccagctacttgggaggctgaggcaggagaatcacttgatcctctaaaaatagctaaactgggaggcagaggttgtggtgagccaagatcgcgccattgcactccagcctgggcaacaagagtgaaactccgtctcaaaaaaaaaaaaaaaaaaaaaaaaaagattattgacactacatgcatgaatcctcaagaatattagatgttataatttatcaacatttccaattttatttgataaaaggttgtcttttttttcattttcttttactattagattaggcatctttcttctatatatttcttggccattttttatttttcctggtgctctgcttattcgtgaaatttgtgcatccctattaatgtatttgtctagtctgatttatttttataagcacttttttggtaaagatattaagccttgtctaccatgtattaaaaatgtcttccccagtatgccttttgtcttttaaagttgtttttaattttcaacattcagaattatttatgtcattaaatctatattaatatttttccttatgtttaattttggcatcatgcttaaaatttgattcacaaacttattattattttctaagagtatgggattaaagcattaatccagatcattagccacttgactgttgcttctgttcccttatgtgtctccatttgtttttatcttttctacagaagcaatggttacccatatatttattatatgcaagtttttgcatcttgttcccctaaaaaagaaaggaatatgtgttttaattttatgtttggcaacattctagggatgggattaccattggcccagttctctgcacccctgtgtaatggagcagttcccttcttaacggtcacctagtggacagggagaagtgtacaacttcagaactcattgtcagtttctggcaagctttcttgtagaaaagttgcatctctttctatccctctgcctcattctcttgcactctgaatctaacactctgcccatgaaaactaaaattcctagcacacactcctcccagggatcattctgtctctatatgcacctgtcgtattttatctgtggggagaatccagtacactattgccagatgtccttcatctcccaacctcacacagtacatttttagcttattgttttctgtgagttgtatctgtattgttttagaatgatggtagaaggagaaggacaaggagaaggtggtgattcatataaatgaaaccagctggaagctgtgatgctttcatagataagccactattatgaagaaggagacttcagatttctgtatagacactgaccagggactcgtgggcaggaaggtgtgcaacaccttcttatctttattcagtgagttcccctttggggagacaaagtttggtacatccttctctttccagctccatctgatccacagaggttctgtccagattcaggcattaagttatctcttcatttggatgagtttccagtttttctgtgtcttcataagtggtttactagaaagtcggaggaggatgcaataggggttgctggccatttgttaattagtgattaattatttagctctcctttaattggttatgtgccaaatcatgtatgattgttttgaaagaaatcaagtaatatggaggtgcattaaggaaaaggcaaatctcatgcctcactacttaccagtgtcctacccttcccttaactcactcttcactgcgtaaagcccagctgtgtagcttccagatcttttcataccctcacaaaaaatatttgtctatttatatttttcacataaagatatatgtattaatgtatgtacttatatattacaaacatttctttaaaataactgtccatgtcagagctatatcccattctactgaaatgctgcctagtattcaaagggtgaaggaatgtgtcctaagttactgaaactaaatgaccattttggttgtcaccatttttcataattgcaaataatactgaaacaaacatatctgcacatttgccccatacatgtgtgtgaatatttctgagggtagaaatgaagccagtgtacatggtatgctctgataggtactgccaaattcttctccagaaaagtcgtgctgtttcattccattaccaactgggcattaaactggcgtgttcccatattcttgccagtgctggatattatttattaaaataaaatttcagttcctccagtcttcttttagttattattttaatctggaagctattacacctactttctgaatacagtttcctatcaccaagtttcctttccttatgtgttctaaaatcccagttaaatatgcacttaaccatacaaccgtaagtcccactcttgagtatttacataaaacctatgtgcaaatacagcagtttagcagttttatttgtaattgccaagactgcatagcagttttatttgtaattgccaaaaactggaagaaaacccagattgtactcagttgggtagtagataaacaaactctggtaaatccatacaatggaatactactcagcagtgaaatggaacaaacaattgatatatacaacaacatggatgaatctcagatacagtatgctaagtgaaagaagccagacaaaggccgggcatggtggctcatgcctgtaatcccagcactttgggaggctgaggcaggtggatcacttgaggtcaggagttccagaccagcctgaccaacatggtgaaaccccgtctctactaaaactacaaaaattagctgggcgtggtggcacgtgcctgtagtcccagttactcaggaggctgaggcaggagaatcgcttgaacctgggaggcggaggttgcagtgagctgagatcatgccattgtactccagcctgggcaacaaagtgagattctgtcttaaaaaaaaaaaaagaagaagaacccagacaaaaaagataactgcatgattccatgtatctgacattctggaaaagatgaagctacagggatggaaaacaggtccatggttcccagggtctgggagtggggaagagggctgactacaaaaggacacgggagtgccctttgcgtggtgctgggactgtagtgcccatgatgtaaaatctgccttggaccattacattagaagaaatcaattccagttatcccaatattccctccaagtgaaatactttggtagcatatataataataattcaataagtattagctattatatttattaagtagtacctatcagaaaacatacttatattagcatgtcaaaggaatgaacacaaaattctctcccatatattgaacgcaccatggaggggggacctgccttcctctggaggaccatacttagtgaagccactttgccttataaggacatgcctttgttatccagaaccaagcagtcaaacactgatttagttagctcctttatttctcagttatctcctgctgatattacatttctccataatatctagagataggcttttatgtccttgctagctgtggtaatggttttgaatcccacttagggggcagaggagtagagtaatggccacttgtgttccctcccaccctcatcattctacagggcatttgccactcaagtactgtaattgagacatttaaatcatacaaataatgctgcccatgaaggatagaggaaatttttagatttccttttaaacctaacagagaaagattaagttacataaaaatgtaaaatacatgatctccagtacattgaaggaaatgtattttcttacttgaaatgtttgtgttacttagactggaagatttattaaatgatttccattctatcactcatgtttacagcaccaaatttggtgtccttgttctaaaaacaatagtacttttctccccatgacttttgaaaatgattactggtttactgattagcatggcgccatgtttgcttgtttgtccaaccttttatctgcatattttgataatgttgtgtggattaatatttgatgacatcctttgggtgatattaacgattttaagctttatttcttctgtcattttctctaaatgaaccaaagagggataaacttcagaatgtttttgatgcctggtggagagctgaactcttaagaaattaaacttgtttacatactatatttattcttgccgcagagacagtgaaacatttcatgagtgttatgggcagcatcataaaagcctttagactttgtttttcatctggggtgattaaggtaattctgaaggaaggttgagctcaaggagagctgagatatcaaggaatggggtatcatctgttttattactccatattttactcccagtgaagtggtaaacaattaaaattcaaacacatcagtgcatataattcagttactcccagaacaccataaaaatgtttccctgatcaataattgcttattatgacatgcatttgttgtgctagctgtcaaggtgcttagctatttgctttctaaaagtatgaaaagcacgcccggctcatcagcctatgtggtaacaaagagcaatccagctgtggatgtcacagagccactcttgacctgttgtgcatagactccctccccacaaatccaaacccactaagactctccaggctctgttaacacacaccagcctggttcagcttggatgccctcctcacaccatgtgggttctgattttccatgccaggcagtccatcttaaatggatgcatcctcaccgtgtttgggcttcaacttcctattctggacctcctcggctactccctaccccaaggcatggagggctgccttgttctgatgcaccttatgattttagcaccaaattgtacaggaagggagagaagggaaaggagaaagaagatgtgaaaggaaagagagggtagggaagaggaaaaagaagatgaggaacacgtattattttctaatcctcacaataggtcctcaaaatgagcaacatttccccctatttcatacttgaggaagctgtgactcagagagactaaggcacttgcccaaggtctcttagtacattaaggagccagcgtctgcacccagttccttctgactctagagcctggattctgctggctgcaccacactgtctttaaagagaacactctcaaaacgcgcttggtctttggattgtctcaaatgtgttagaatagtgttttaagaaaaggaatgcagatctcctgggaagcaataggtcgagttcatttcatgagaatcatttttctagccattggcctacttccccatttttctcctgtctgcatctaggtgcaacaggaacttggctttatttgactccattgccagggtggggtaatgaagctgggactctcttgtagccagcggcagtgagccagcagtctcactgcctacccagtgatggttccttctgtggccagcacttctggaatgagtcatctttacatgtttgccaacccttgtcctctcctccccagccaggttcacccttgctgctgtcaaggagctttgagactttctgagatttttaaatggggaagtagatgttaaacctagtatgaggaagagagggaaagtttgctctggtttcaaacacacagtcatagaagatgctagtcttaatgctttccatagcaaaaaccctgaaggcttagagtgtacacattgtgaactgaacttttaacattattgtgtaactcatttgttaatgcctatttgtcattgactgtggggtccatgtgaaaaactcccacaaacactctaacaaaatggaagacagaaaagaaagcaagcatcatttgtgtacaatagccaaagaacaatagccaaataaatttgatggtctcaaaagttaagcatcttttgaagagaaaatttgattttagggccaggtggggtagctcatgcctgtaatcgcagcactttgggaggcagaggcgggtggatcacctgaggtcaggagttcgagaccagcctggccaacacggcaaaaccccgtctctactaaaaatacaaaaattagctgggtacggtggcgcatgcctgtgatcccagctacttaagaggctgagacaggagaattgcttcaactcgggaggcggaggttgcagtgagccaagatcatgccgctgtactccagcctgggtgaaggagccagactctgtctccaaaaacaaaaacaaacagaaaaaagaattgattttgattttttcagatacagtgcatgaactttttatcataaaatattaaagctggggaaaatatcttagaattcacctcatgttcatgctttaccctgtgaagaaacagaggcacagagagaaataacttgaggataatggaaacaagcacacatctgtaagtgtgtgtgtgtgtgtgtgtgtgtgtgtgtgtgtgtcagagagagagagagagatgttcctttgtaagtaaacactcttggaaatagccgcattttattataacacaaaaagtaatgctaaagctgatatagttctggttgctaagcttcacacacaaaaggtctttaggtagctgcttcctaatttttatttctgtggcccaaaagtctccttgtaaaccttcgtgtcatgtcatactaaacctttgacatcaataccctttaaaatgtacaagtccttaaaaaaaaaaaaaaggcaaagggcaaatactaatgtgggaaatttgaattttaattaactgtttgtttcaatgttaggataaattaatgttagataaattctttggtaatttttccccctaaaattggatttttcaagaaacatcactggttcagtatattgttatttggggtagcataattttaggcgataacttaatatttgcatatatttgtcactactttgagttggtttttgtcccctgacccccagccaggatgttagatcacacagatttttttttctttgagcccttagggagagtccaaaacagtcacttcatgtactaggaaagtttacccagtcagcacacacagatatgttgttgcctacatttatatttgtgagagtgactgttaagaaactagcaggtttataaaatccgtgtgagaatttctctcaaataactgttaatggacaatccagcaatcctcccatctcaggctcccaagtagctgagactacaggcaggtggcaccatactcggctaattttttgtgttttttgtagagatgcggtttcaccatgtcacccaggctggtctcaaactcctgggctcaagtggtgctcccgccttggcctcccagagtgctgggattacaggtgtgagccactgcacccagcctgtacattttccttgaaatcgtttttggatgtttagtcttatttccttattcagagttcacctgtttattttttttttcatttccccaatttagcctgcgtttcacccagccctagcaatataggtttgggtcagagaaattcaagcggccaggggatgctgaagatggcccattatggccgggcgcggtggcacacatctgtaatcccagcactttgggaggccgaggcaggcagatcacaaggtcaggagatcgagaccatcctggctaacacagtgaaaccccgtctctactaaaaatacaaaaaaattagctggctgtggtggtgggcgcctgtagtccaagctactcaggagactgaggcaggagaatggtgtgaacccgggaggcagagcttgcagtgagcagagatcgtgccactgcactccagcctgggcgacagtgagactccgtctcaaaaaaaaaaaaaaaagatggcccattgtggtaagccttgacttgaattagtcaccaagctagtcttatctcttttctaggctaattcttgttttttgtttggctcaaaacaaattgtttgtcttcagaacacaataaaatccagggagagtgtcctgttcttcctacagacgtcactgggacatcttattctttaattaattcagtcaactaaaattggtcaaatacctgctctctgtgccagagttataaactttgtatttgtataattgctagtagctctcttacatttcttactttatctatctggcatttgatctacctaataccttccaatatcacctcatgtccctttaccagcttggtggtttttctatagttcaggaaatcaaacaaaatggtgtgtgacctggaggtactagaaaaacaatagcaaaccaactccaaagccagcagaagaaaacaaataaccaaaatcagagctgaaaaaaattaaaacgtgaaaatccatacaaaagatcaatgaaaccaaaagtttgtgattcaaaaaaaaaacaaggttgatagatcactaactagattaataaagaaaacaagagagaagatcgatccaaataagcacaatcagaaatgacaaaaatgacactacaactgatgcctcagaaatataaaaaatcctcagagactgttataaatacccctatgcacacaaactagaaaacgtagaagaaatggatagattcctggaaacacacaagccccctaaaattgaagcaggaagaaattgaaatcttgaacagaccaatagtgagttctgaaattgaatcagtaatacaaaacccaccccaaaaagcccttaatcagatggattcacagccaaattataccagatatacaaagaagagctagtaccaatcctactgaaattatttcaaaaattcaaggaggaaggactcctctctaactcattctgcaaagccagcatcattctgataccaaaacctgggagagacacagcagaaaagaaaacttcaggccaatatccctgatgaacatcgacacaaaaatcctcaacaaaatactacaaaccaaatccagcagcacattgaaaagttaattcatcacaatcaagtaggctttattcctgggatgcgaggttggttcaccatacacaaatcaataaatgagactcatcacatagacagaattaaaaacaaaaaccacaggataatctcaatagacacagaaaaggcttttaacaaaattcaacatcccttcatgttaaaaaccctcaacaaattaggcattgaaagaacatacctcaaaataataagagccatctattattcaactatccacagccaacatcatactgagtgggcaaaagctggaagcgttcctcttgagaactggaacaaaacaaggatgcctactctcaccacttatatcaacatggtactggaagtgctagccagagaaatcaggcaagaaaaagaaataaaagacatcccaacaggaagagaggaagtcaaactagctctgtcacagtgcaggcaatataattctgtacccagaaaacactgcagaccctgctaaaaggctcctagaactgataaacaacttcagtaaagtttcaggatacaaaatcaatgtacaaaagtcaataacatttccacacaccaataatgtctaagttgagggccaaatcaagaatgcaattccatttattttatccttttgaataaaatacctaggaatacagctaatcaaggaggtgaaagatctctacaatgagaattatgaaacacactgaaagagatcagaggtgatacaaacaaatggacaaatattccatgctcgtggataggaagaatcaatattattaaaacagccatagtgcccaaagagatttttagattcactgctattcctatcttaattagcaacatcattttttcacagaatttaaaaaaaaaaacctattccaaaattcatgtggaaccaaaaaacctgaatagccaaagcaatcttaagcaaaaagaacaaagccggtggcatcacactgtgtgacttcatactacactacaaggctacagtgaccaatacagcacagtccaggtacaaaaacagacacgtagaccaatagaacaagataaagaaccagaaataaagctgcacgcctacagccatctgatctttgacgaagttgacaataacaagccatgaggaaaggtctccctattcaataaatggtgctggagcaactggctagtcatatacagaatattgaaattggacccctccttttaatcatatacaaacattaactcaagatggattaaggacttaaatgtaagacctaagattacaaaaaccctagagaaaaaaactgggaaatactattctggccattggccttggtaaagaatttatgaataagtccccaaaagcaatggtaacaaaaacaaaaattgacaagtgggacttaattaaactaaagagcttctgcacagcagaagaaactatcaacagagtaaactgataaccaactgaataggagaaaatatttgcaaaccgtaaatctgaagaatgtctgatatccagaatctataaggaacttagataattcaacatgcaaaaaaccaccccatttaaaaatgggcaaaggacatgaacagatacttctcaaaagaagacatacatgtggccaaaaaatatatgaaaaaatgcttaacatcactaatcattagataaatacaaatcaaaaccacagtgtgataccaactcacaacagtcagaatgcctgttattgaaaagtcataaaatagactgggcatgtggcttatgcttgtaatcccagcattttgggaggctgaggcaggaggattatttgaagccaggaggttgagaccagcctgtgcaatgtagcaagactgtgtctctacaaaacatcaaaataaatggaaaaaaaaaaagaaaaagaaaaagaaaattaactgggtatggtggcgtgtacctatactctcacctactgggaggctgaggtgggaagattgcttgagcctaggaattcaaggctgcagtgagctataatcacaccactgcactccatcctgggtagcagaacgagaccctgtctcaagaaaaaaaaaaaggcaaaaattaacatgttggaaattagttcagtcactatggaatgcagtgtgaagatttctgaaagaacttaaaacagaactaccattcaacccagcaatcccactactgggtctatacccaaaggaaaataaattgttctacaaaaacgacacatgcactcgtatgttcctcacagcacaattcacaatagcaaagacatggaatcaacctagatgcccatcgacagtggactagataaagaaaatttggtacatatacaccatgaaataccacacagccataacaaagaacaaaatcatgggggtttttttgcagcaacatggatgcagctggaggccattatcctaaacaaattaacacaggaacagaaaaccaaataccacatgttcttatttataagcaggagctaaacatcgggtaaacatgggcataaagataacacggtagacaccagggattactaaagaagggaggatggaagcaggtgtgggttgaaaaactgcctattgagtaccatggtcactatgtgggtgacgtcagtatcatgcatacatcaaacctaagtgacatgcaatttacccatgtaatgaatttgcacatgtatcccttgaacctaaaataaaagttggaaaaaaataaaagataagatatcccgtatcctcaataaaaataaaagtggcgtgtttgtgcacttgactttgtaacatgttttccaaagatgtctttgagtcataaaaatgggaaatacacatgttggtttctctagtcatcacttgacaacttacatgttttacctttcttatgatggtctgtctcatttcttcagtgacagggctagacattctgttttaaactcttcccacagctgtatattattcaacacaactttaacagagttcatagagtggagattgaggatgtttgcaaagttaaatcatttatttttattttttcttaaccatgtcccgcctgctttattcattattaagaacattgatgtgaagattaaatggttttctctatttttatcttcaaacgatctctatttgtggcttctgcacattgctagatttattccagccacttacactagggtcatagtttagcttcagctcggagccaaatgccccacagctgaaatgaccgcacctctgaagtggcattttcccaggccatgcctccctttaataatgagccagccagggggtaaatttgtatctcattacaacagagccttgtattaggcctggagaataattaaatgtgaggaattataattggttccctctttgaaagctctctcagcaccatgtctacacttaagccattacttttatttttaatctaatggtttgccgctctctctccctctttctctctccaaattaaatatcaaccataaaagaaaccaaggaagtccagaaatctgtggctttaaaaagactggatctcgaaaagattttcacaagacgcttccgaaacagacgtttgagtcggaaaccttggagtgcagtgaacccgctgctcaggtatttcctgtcaacaaacatggttaccaggttactgggctcttctgcccagggcatgctgtcagttttacaaactagaataaacgatagacgcatagaaagtttgagtaggaggaactttaccatctgagtcagtgattttttttttcaaacttatttgtagctgtagaaattggtgttcaaatgaaaacccagaaacccaatgattaaaatagaaaaaagtggaaaagctctaactgggggacagagacaccttgggcccatccctacgacagttcctgcagagactcttggtgcccctaaggcaaactacagagtaatgaaaagctctatgctgaggccagaatacctgcattctcctagtgattctaccatgtactaactctctaacttcaagcaggataattaaacttattgggcttcagtttcctcccctgggaaacaaggatggtaatactaactcatgaggttatttgagtattaaatgagttaatatccataaagaattagaataatgccaagtacacttagtgcctagtcaatgctggtcactgttattgttattgtcattattctttttcttttttttttttgttgagacagagtctcgctctgtcgcccaggctggactgcagtggcacgatcttggctcactgcaagctccgcctcccgggttcacgccattctgctgcctcagcctcccaggtagctgggactacaggctcccgccaccacgcccagctaatttctttttgtatttttagtagagacggggtttcaccgtgttagtcaggatggtcctgatctcctgaccttgtgatccgcccgcctcggcctcccaaagtgctgggattacaggcatgagccaccacgcctggccagttgtcattattcttataaagtaattacagtttaaaattcaagttaaagtgtacatattgtgaaatgagcttttaacactattctgtaactaattttttaaatgcctggggtcatttgaagaactccagcaaacactctaacaaatagaagacagaaagaaagcaagccttcatttgcataaaacggccaaagaacaatagccaaataaattccatgtttccaaaagttaagctctatacacctatgctcacagcagcattattcacagcagccaaaaagtagaagcagcccaagtatccatccataatgaatggataaacaaaatgtggtcgccaggggctgggggagggaggagtaggaagttattgtttaatgggtagagtttcggcatcccaagatgaacagcattatggagatggatgctggtgatggttatactgcagtgtgaatgtgtttaacactactgagctgtccaacctgcccattttatagatgagaaaaataaaattgagaagaaaaaatttgttcaagtttgcacagaacttcttgtaaactaatatagttttcagcttccatgtgtcttcataatacaggaatctcaccatgctggaaatgattcgaggtttttaaataatactaatttttcagacaaggtggtccccctaaagcaaagcccactacttacttggagcttcacagtagaatcagccatcatttccagcgctaaatatgacaggcttactgagggatagaatacctggatgctctgctctatgggagatttaaggaatttttcatcagtaattttgactgaattccattttcaccctacatgctgaccaattaaattgttcctcttaatgttagtcagatagaagccacggtaggtatttcagcagaagaaatttaacacagggaattgattaaaccggttttggaggtctgagagaaccaaaagggaaaaatggaggctatcctaaaatcgtcattatgggaaacagcacaccagcctggggctggggtatacggcagtggttctccacttcagcttcatcagaatctcccagagggtttgttcaaatataggttgctgggccctgtctgctggaatttctgattcagtaggtctggagggtgaacctcatactttttaattagcatttcctaagtgatgctgatgctgctggtcccaggaccacaatttgaggactgcaggtctaggggaagatcttggagttgtcagaacgtagaagctcagaagaggagcctgagagcaaggactgaaatccctgagaaggtactgcccagctggtggtgttgtctcaagatctcagagggaaaaacctcatgaagcctggactcacgcctcacaggaggagaaattgcccggctggtgctggtaccttcaaggaggtaagataagggtgattctggaagtaccaaaagaacctgaaggctagaaccagctgtcactacgaaggtgagaggaatagcaagaggaaggagccaggccctttgacctccttgaaccatccggtaaccctgtagtgctccctattgacagaacctaaagggagcagcagacacagcggaaatatgatttgctgacctagcatcaaagaacaaggcataaaagggtgaatttggagcccagaaacaataggtgaagaccagcgtacacacaaagcacacgctttcctgcagcatactagcagagaactcaagtcactgtgttgtgtgtggttttttttgttttttttttttttttttttttttttttttttttttttgagatggagttttgctcttattgccaggctggagtgcaatggcatgatctcggctcactacaacctccgcctcccaagttcaagcgattcttctgcctcagcctcccgagtagctgggattacagacatgcgccaccacgcctggccaattgtgtatttttagtagagacagggtttctccatgttggtcaggctgatctcgaactcctgacctcaggtgatccacccaccttggcctcccaaagtgctgggattacaggtgtgagccaccgcacccggcccactgtctgtgtttaagagccaacttgatcatatgatccagcagtctcactactagatatatgtccagaggaaaggatatcagtatatcaaagagacatctgcactcccatgtttattgcagcactattcacagtaaccaagacgtggactcaacctaagtatccatcagcagaagaatggataaagaaaatgtggtatgtatacacgatagaatactattcagccataaaaaaatgaagtcctgtcatttgcatcaacatggatgagtctagaggataagtgaaataagccaagcacagtaagactaatactgcatgatctcacttatatgtggaagataaataagttgatctcatagaagtagagggtagaagtggtaactagatgctgggaaggatggatggagaagggaatagagaggttggttaacggttacaaaattatagctagataggaggaataagttctagtatttgatagtactgtaaggtgactagaattaataataatttattctgtgtttccaaatagctagaagaaaggattttgaatgttcccaacacaaagaaatgataattgaggcaatgggtacactaattaccctgatttgatcattacacattgtacacaggtattgagatattacactgtattccataaataggtacaactattatgtgtctattaaatttttttaaagagccaaattgtacaaaagttgtttgttttgaaatattggaataatactcatcatggagagaatctcagactgcgagatgacagcaatgttttcaattccactctcattcttgtgcaccttcttattgagtagaatggtgaggccacatagctagatttataaaatttaaacaagtatatgataagattccttggtacacgtagattttataaaaattagattatattatgcataatattgcaaaacttcctttttcatattagcaatatactgtgattatctttctcttccaattaatacgtgttctttcttttttagagacagagtcttgctctgtcgcctaggctggagtgcagtggcacgatcttggctcactgcaacccctgcctcccaggttcaagtgattctcctcccttagcctcccgagtagctgggactacaggcatgtgccacgacacccggctaattttttgtatttttagtagagacggggtttcaccatgttagccaggatggtcttgatctcctgacctcatgatcccccggccttggcctcccaaagtgctgagattacaggcatgagccaccgcacctggccaggttctttcttttaatggctacataacattctattttatgaaagttccaaaatctcttaacacttcctttttgggggcatttagtttacttctattgttttgctatcacgaacagtgtttcagagatgcccttgccctcacattcttgcacacttgccagttataccctacggataaattcttagaagtgaaatttctagattaagggatgagtaatgttagatttttttacttatatgtatcttgatatccttttaaataaatttgggaaattaaagtcattttccttaaactcttataaattttaagaaaaacaaaagtattaataatcgaagtgttaatattgattatttctagcacattcagtttggggaaaatttatgatctagtagagtagtacttttgtgaggtagatgtcacaaaaaatgtgtagtatggagaaattgtccagtagtatgtccatttagtagaattttgagaataacattttgccataaattttatagatatttaccattaatccatttgtagtcctacaacatatagttgattacagttatacattttttgctgagtctttggttcaaagcatgcagttcccaattacaaagacattcctaatggaataaaacatccactttgtgactgatttaaggttgttttcttaaagcacaccgcagccaaaagtggacacagcttgaatagcaaattttttcctttttgttgttgttgcttcatccaataactgttaccaaattcccgtagaaaagtgttgcccactcccacatcgacctttggaagcataacattcagctttggtgtctatacacaatttaatttggaaggctcctcacaaatcatcttattttccagtttcaaaaaccaagttctgagtggagattaagacagggtctctttatttcccagtgcagtctcctatctatttatttgtgaatgaatgaattagttaattaatgagccagggtttcactttgtcacccaggctggattgcagaagaagtcatcgtggccaagcgtggtggctcatgcctgtaatcccagcactttgggaggccaagacaggtggatcacttgaggtcaggagttcaagaccagcctggccaacatggtgaaaccctgtctctactaaaaatacaaaattagccaggcgtggtggcgcgtgcctgtaatcccagctactcaggaggctgaggcaaaagaatcacttgaacctgggaggcagaggcagcagtgagctgagattgcgccattgcactccagcctggccaaaaaatgtgaaactccgtctaaaaaaaaaaaaaatccaatctttcctattggctttattaaatacactttaactttagaagcttagaagcacaataattagaactggcctaactttaaaaaaaattttcacaaagaaattagtaacttgtagggtcatttgtaatctttttctctgttgatttttacagttttaaaaagttaatacaataatttatttacttattttttgagacggagtctcgctcttgttgcccaggctggagtacagtggcaccatctcgggtcattacaacctccacctcccgggttcaagcgattctcctgcctcagcctcccaagtagctgagattataggcactggccaccatgcccagctaattgttttgtatttttagtagcgatggggtttcaccatattggccagtctgatcttgaactcctgacctcaggtgatccgcccacctcggcctcccaaagtgctgggattacaggcatgagcccaatattttaaaaatagtacattattacagaagctagatgtgcactttaaattattatcagaaaattagtatgacagacaaattctatgattgtcccatcatctgggcctgtgacattcacacctttgtgatgttcatccccgactgtgggtgggacctgggacttgcttctgtcaaaacaatatggcaaagcatgagaggatgtcacttgtgatcatattagatagcagccaaaatggattaaagacttaaatggggccgggcgcagtggctcacccctgtaatcctagcactttgggaggttgatggcggcggatcacctaaggtcaggagtttcagaccagcctggacaatatggtgaaaccctatctctactaaaaatacaaaaataaccagatgtagtggcggacgcctgtagtcccatctgctagggaggccgacgcaggagaattgcttgaacctgggaggcggaggttgcagtgagctgagatggcgccattgcactcaagcctaggtgtcgcagcaagactcggtctttaaaaaaaaaaaaaaggtaatcatacctcactgcagccttgaactcctgggcggggttcaagcagtcttcctacctaaacctcccaagtagctaagactgtaggtgcacgccaccatgcctggctaagttttgcttttttttttttttttaagagactgagtctcattgtgttgcccaggctagtcttgaactcccggcctcaagcagtcctcccaccttgtctacccaaggactgggattaaaggcataaaccactgcacctggcccagtctcctttttgttacaacttcctccagctctgttttgctctggtgtgagacatgagcatggttcattaagaggcttggcccccccagccccaggaaagaacaagccaacaaccgataggaatgtagtactgtttttagtcctttcctcaggactggtttgtctgcataagatgagtaactacctgcttccaggtgagaagaagacatttaattttagagtagtccagccaggaagctgagatgtcattcttatcaaatccgcagtttcttcagaagacttgaggcctggctgagattctgtagtcccaaattggagcagtcttgagacatccaagattcttcggttctcattttagacttgccgtctctctcacaaagacccactgttttctctcacaggcaggcccccgccacttaaacgtgctgtgcgacgtgtctgggaaaggccccgtcactgcctgtgactttgacctccgcagcctgcagcctgacaagcggctagaaaacctcctgcagcaagtgagtgccgaggactttgagaagcagaacgaggaggcccggaggaccaataggcaggccgagctctttgccctttacccatcagtggacgaggtgggtgccactgtttccatactggagaatctcagtgaagactctgagagtcatgtggacaattgtgttgttcattattactatatagcagcccatggtgtcagggctcacttgtatgatttctggggcctcgtttttcactcaggcaagcctgtgtgtcatagcagagccattattgattatcacacagatgggattctgataataataacaactggaattttcatagcactttacaaaatatgttcactaagagcatctcatttaatccccaaatgtttcaagggtctacatgtagtaatcacacccagcaagtcaaaccatcctattatttgaggggatgtgtggtcactaatccattgagacatacattacttaaactttgatgttctttagtgctttgttactttctttttaatggtctctatgagcaaccagagagacctgctttgaaaacatttcaggctaggataatcacagcccatgctcccaatgtatagaactttgggatcttgattgtttacttcttcatttattggagctgactgacaacaataggataatgtagactttgcctgtggtcactgcctgaggcactttggatgaaatgagaggtgacgattattcaagccttttgtctgtttgaactccttatactgtataggaggctctcagttttcccctctgcgtgaggttatctacacttctgggtcttgccagaacagattactgctatatctctgctgtccaaatggtattgaaagttcagttggaagaaacaggatttgaggaaactgcataaaagatattctatccatccatgcctctaaatatttgaaattcgatccttggattaagtgagacaatcagagagcctgatacccccacccttctggattgtgtttgctaacctgcccttcagtgagctcacgactggtcagcaaggaggacaataaaggaaacagcagtcatgagataggatatcacgtccacatggaaatactattgttgacattgacctactcaccatctagcaccttcctctttgatgatctaaagggcaattagccttcacatcttccgagaaagaagaagcacgcttctgctgagataatacaaacacttagagattgtgctcattttgtaactaactctcttaagttctttacttagagcaaacttctgtccaccttcaccaaatgtggcaacttaatgattggggtcctgaatttactccagctttcttttcttttcttatcctgattttctaagcaccttggtttcctcatctatttttattttatttgcagtttttgtcagcagcctcaaatggtcttctgaatgaggcagaatataaaaataaattatctcacttatatatagaatctaaaaaagtggatctcatagaaacagagtagaaaggtggttatagcaggggctgtggggagagggagaaggtgttggtcaaaggccacaaagtctcaggcgggaggaatacgttttagtgacctatcgcactgcacagtgaccagagttaataataatgtgttacatatttcaaaactgctttaaaaaaggatttttaatgttctcatcacacacacacaaaaggtaagttggtgaggtgatagatatgttaattagcttgatttaatctttctacaatgtatgcatagatcaaaacattacttgatttaatctttatacgatgtatacatagatcaaaacatgacactgtaccccatagatgttcacaattactacttgtcaattaaaaaataaattaataaagtatgaataatgtgagcaatatcatcatctcctttcctcagattaaaaagcaacaattaggctaaagagctttttcaagattcaacagataaattaaattacaaaatggggccctaacccgctaactacaaagttcgtgttcccttgtttatgtatctacatacatatgactacctggtatgttgggacacataactgaaatccaaatatgatatttttaaatatcatgtaactttttagtttccatccacgacattaagactttttaccagatttgtcaaaacatattaaatcagactgatttggcctttactttccttcctcttcctctcagttctgtgatggagatgccaacatgtaatagagggacccaaagtggatgccagaagagagagaacaattaaaggatgcagagaatatgtccagtgagacgtttgcttgtcagtgtctccctggtggtattagaggggagaatgttccatctgaacagattaaaataatgaaacgtagcctggttttagaggaactttgttttatgatctttgaaacaatgcagacgctccattgggactgaatgttataatctgggagcaggcctaatggggcctgcttttattgagtagagagaagtgcttcgtaattagtgttgcagttatttgtaaactggcgtgtctaaaatgcttgagggcctctataccagccctttaatattttgaagctgttgtcacagaaattgcatttgtatttataatttgtgctttctccaaagaaagttctatggaagaaaggtaaatttctgcctactctgacatgattacaaatgctggttttttcgatgacacaatcagatttttaaatatatcattacttgatttccctgtaaggaaagttagaagagaggtaaactagtatatccaagttatggctgagtctacaggagaagcaaaagttggacttaaccaccaagcttctataaggcaagttctttccctaattcattctgagtctacaaaaggcggttattctacaaaaggcattctatgtcaatccctaagaaagattccactgatactccaaattatagaaaagtttgctgaggctgttggttacaagtgacagaacccaactaaaaccaattcagaaaaaaaggctaggggagtacttcttggctcacctaagaaaatcacaggtaggcaaatgtggagttgacctctggatccattgggagagtaaatgaaagaatatcatctctctcatactgtctctttctctctcattatctctttcattccgttcatttatatatatttttaggatgatgaaaacaagaggtatccattaatgtttcacatttccactttctgtttgcttgggaattagttgccatttcagttagctataaagcctgaggaaattcatatagcttagaagagactgaggaaatatatcacccaaatgtcatatgtggaccttgtttggatcttgatttaacaaaataacagtaaaaacaaattgagacagtcagggaaatttgaaactgacaaaaattatttagtggcaataagaaattattaatttttaggcataatggtattgctgtatgtttttaaaagtctttatcttttaaagatatgtactgaaatatttatatatgtatatggtctctgggaagttgcttctatgtaatccagtattgagcgagaaaggtggtaagtgggtaaatagatgaaaccagaatgcccctgaattgaacttgttgaagctagatgatgggtgaatggttcttcattgcattgctctctcaacttttgtgtatgtttaaaattttcccaatgaaaatcttttttaaaaggatttcaaaaattagaatctagaccaaaggcagtcccagaaatccatgagtgtctctaccttcaggttgttttccagttagggagatcttccctttagatatgtctgttccaatgatcctaaaaggtccagattgccctgagcgagtaggcatcaaaacaatgtctcctctgaaataaactcagccattccacccagcaacatggccaaccgccgtaaccacaaggaatggggaccacagggagaggttggagtaatgatgagcttaccacattgatcattccatcaaagtgggtacatatttaccaggaaggtgactttactgctatttgcaagaatgttaagcttgctgtggggtattcactggaaagctcccaggaaaagacagtgagatgtgaccctgttctttggacccttgcgatgggcagagcactcaccagtgtttggaaagcatactgcaagagtgggaattactgttttcaaggatttgcactacttatttttgcatacatgaatataattaacatagaatgatagttcagatacagatgttaaggttacaataggggcttgatatttctctttaagtgtttagtttctgtgcggtaaaataaacaggtagagctcttaatttgtcattactaaatttcatatacctagcactttaggaagctctaactgcataagcctgtctagaacttgtcaattcaaccccaagtctctatcatctgtttaagaaaacagtgaactgagaaagtgactctgtattataggatcaatggtttacagccttaagtgaaccattctgactcagatttcaaatctgaaactcacatacttactagtaaagcccttgacaggagaaatattgcaaatgtgtaattagagtgggcaaaaaacacacaaaaacatcaacaataggtataagattttgcaatgccatctggtggatgttactaagccatatccatgttcacatttccttccttcctgcttcagtctctttgtcttgaatgcttgggtttctaaaaggagaaactgttttgctgcaaatgctggctttgaggttgggggttggaagagaaactttcttataaaaggcagagtgttagaaaaaaagcaaatctaagttaacttgagccgtggagggtagccttcccttccctgggttaactctaattggagctccccacagaattcactaatgatttccttacgatgtgattaaaaataggaggatgctgtggaaatacgtccagtaccagaatgtcccaaggaacacctgggcaacagaatattggtcaagttgctgaccttgaagtaagtatcaacaaacacactgccaccgctttgagatttatcttgccttttacatacaaatgttgtgtttattatcagagcttgaatcaaagcggagctcccaaaatacgtctaacagtgggcagctgtggagtagtagaaagggcacgtttgagtccattcctggattttttttctaccaacttcttgatggtcattcttctacaatagagaaggcaaacacacgtgtctactaaagttaggcaggtaaggtcattgagtgaaatgacctacattaagaaaaatagcgcttaagtcagtggtgtgctggagtcgactgtactaactcgtgagatctgacagtgcatatctcttcctgggttcggtgaagtcacattggtaactttaaattggccatggcgaaagtatttacaatgtagaaatcagccaatgctacacgtttgcaccaccctcagcacccggagattatttgtaaaacatttaccagtatgccactgttgaaacacaatgataaatgcaactgaaactcagtgccaggggacaatagggagtggtgaggactgtagtaaactatgttaagggggcactcactgctagcaacagactcttgccatccaaataaacaggcccatttttgtcaactgtcttttctattttttcaagagaagctgaaaacccagatttttctgcataatataccgactccctaaatatgttctcattccctttataaacaccatataattaaaacacgactacagtctggtttcatcttgtgggccaattatttgccacatctacttcaaagtagttgcatccaaacgtttcaattgtatactatgatagcaaaaaaaaaaaatcctctatagacatgtattaattttgtactttcatattaaaatattatctacattataaaacataatagaaattttaaagatgaactagataaatctatataaattctagtattttcttcttccactgcaatagattgtcttgtgtaccctcggagtgcctccatacctctcttcgtctctgcagactgctattttcaagaattagttctccttcaaatccacagatgaaaactttaaagttgtacatattttacctaagcaaaactacagaagcgtaacatttatttatatactattagatgggtcatccatctctcaaagtcacttcataggtcccttcagcggcccctggtttgcagtgagaaggcatctggattctggatgtaaggctgggtttcaacccctgggaacttccctgggattttgagttcttccctataaatgaagttgatagaccttatggtctcaaaattcctacctaccacaaacttctatgattctaacgcatagcctctgccaacttcttctgcctcagaaaacaagccagcaagtctgctcacacagctatgggtggtctcttgatattatagtctcctcccgctggccagttctaccagagggtcttcagggccttttgtacggagaaatgagcagcccataaaccagctgagtgtcaagtaatgggcacagaaaagcaagctcttgcccttgcaaaccaacctggcagtgggagcttcctcatctgtctggttggcgggaggactgagtggaagtggctcttcccctctgcattgtttaggaagccttcgctattgtctgagggacacacctgccccgacaggatgcatcatcaggctacttttagatgcagcgactatgtcatttgagatggcagaaattctcctctatggtgctcatagccaagctttctagacctctccagtgaatgagaggcagctgttctcacaggtgggaaaacatggtcactaagagagatatgtgttattttaaaaaaatgttaatggaggccaagtgtggtgactcacacctgtaatcccaacactttgggaggccaaagtgggaggatcgcttgaggccaggagtttgaggccggcctgggcaatatagtgagaccccctctctaccaaaaactaacagatgtgttaatttttagccctagctacattgggaggctgaggtggaaggatcgcttgaggccaggagttcaaggctgcagtgagctatgatcatgccactgtattccagcctgagtgacagagtgagaccctgtctctaaaattaaaaaaagaggagtcacttgaatatctcttaatgaaaattgtaaagtgcagtttctagtgatgtccccgcaactgccaaagcagaaattaagtcgaattgacatatttgccaggtgcacttggcctgctcatgtgttttaaatagtatctatactaacctataactgcaagagaagagatagaccaaaaagacagccctccgagtaactacttagagtaaactagatgaaagaaagaaacaaattcttataggtaagcctagaatgtgacagtatgaatagtaaaaatataagggtaatattaatggcaaatgttttcccatttacattgatatgtaggattctattcataatactacatgttttagcccctgaggaatttgtttaaagttgtagacatctgtaactgtctctgtattgcttttcagaaatatagaaaccctcaaagatacagagagaattagggtcctgccaattctgcaaatgtttgtaacagaaaaaaaaaaaaagaatgacaacaaagtatttttctgttttgtgttttaaatggagaaatattttaagatttaataccatcttatgaaaagtaatctcagctcttaggagtcttcttgatggtgaaactttaatgtgcagaaaatttgcccaggcagtttcttttaaatgcagattttggaggaccttccataacaatctccctcaagagattctggttgagtaggtctcaggtgggatcaagaaacctgcatgctggctaacttcttttgcttcaaaatgctagattctggggactacacttaaagaacaaacactcacggaaaaagcccaggttctgtgatcagagatggctgggctcaaaacctgaccgaacactcacggaaaaagcccaggttctgtgatcagagatggctgggctcaaaacctgaccgaacactcacggaaaaagcccaggttctgtgatcagagatggctgggctcaaaaccggaccgaacactcacggaaaaagcccaggttctgtgatcagagatggctgggctcaaaacctgaccgaacactcacggaaaaagcccaggttctgtgatcagagatggctgggctcaaaacctgaccgaacactcacggaaaaagcccaggttctgtgatcagagatggctgggctcaaaacctgaccgaacactcacggaaaaagcccaggttctgtgaccagagatggctgggctcaaaacctgaccgaacactcacggaaaaagcccaggttctgtgatcagagatggctgggctcaaaacctgaccgaacactcacggaaaaagcccaggttctgtgatcagagatggctgggctcaaaacctgaccgaacactcacggaaaaagcccaggttctgtgaccagagatggctgggctcaaaacctgaccgaacactcacggaaaaagcccaggttctgtgaccagagatggctgggctcaaaacctgaccgaacactcacggaaaaagcccaggttctgtgaccagagatggctgggctcaaaacctgaccgaacactcacggaaaaagcccaggttctgtgatcagagatggctgggctcaaaacctgaccgaacactcacggaaaaagcccaggttctgtgaccagagatggctgggctcaaaacctgaccgaacactcacggaaaaagcccaggttctgtgaccagagatggctgggctcaaaacctgaccgaacactcacggaaaaagcccaggttctgtgaccagagatggctgggctcaaaacctgaccgaacactcacggaaaaagcccaggttctgtgatcagagatggctgggctcaaaacctgaccgaacactcacggaaaaagcccaggttctgtgatcagagatggctgggctcaaaacctgaccgaacactcacggaaaaagcccaggttctgtgatcagagatggctgggctcaaaacctgaccgaacactcacggaaaaagcccaggttctgtgatcagagatggctgggctcaaaacctgaccgaacactcacggaaaaagcccaggttctgtgatcagagatggctgggctcaaaacctgaccgaacactcacggaaaaagcccaggttctgtgaccagagatggctgggctcaaaacctgaccgaacactcacggaaaaagcccaggttctgtgaccagagatggctgggctcaaaacctgaccgaacactcacggaaaaagcccaggttctgtgatcagagatggctgggctcaaaacctgaccgaacactcacggaaaaagcccaggttctgtgatcagagatggctgggctcaaaacctgaccgaacactcacggaaaaagcccaggttctgtgatcagagatggctgggctcaaaacctgaccgaacactcacggaaaaagcccaggttctgtgatcagagatggctgggctcaaaacctgaccgaacactcacggaaaaagcccaggttctgtgaccagagatggctgggctcaaaacctgaccgaacactcacggaaaaagcccaggttctgtgatcagagatggctgggctcaaaacctgaccgaacactcacggaaaaagcccaggttctgtgatcagagatggctgggctcaaaacctgaccgaacactcacggaaaaagcccaggttctgtgatcagagatggctgggctcaaaacctgaccgaacactcacggaaaaagcccaggttctgtgatcagagatggctgggctcaaaacctgaccgaacactcacggaaaaagcccaggttctgtgatcagagatggctgggctcaaaacctgaccgaacactcacggaaaaagcccaggttctgtgaccagagatggctgggctcaaaacctgaccgaacactcacggaaaaagcccaggttctgtgaccagagatggctgggctcaaaacctgaccgaacactcacggaaaaagcccaggttctgtgaccagagatggctgggctcaaaacctgaccgaacactcacggaaaaagcccaggttctgtgatcagagatggctgggctcaaaacctgaccgaacactcacggaaaaagcccaggttctgtgatcagagatggctgggctcaaaacctgaccgaacactcacggaaaaagcccaggttctgtgatcagagatggctgggctcaaaacctgaccgtgccagtccctaactgtgtagactttggcaagttccttattccctgggaaccttgctttcctggtgtgttaaatgcagataatatctgcattacgctgtagttgtgtaaagagactgatgtgtggaaagcacttattataacacaattttaagtctttaataaatgtcaattctctttttctttctcggaaccacagaggacttactactcagtaccaacctaagtatatcacagcaatattcaggccctttgtgtagtagggagtaaacaattaaatatagattgagcatgccaggcagcagctggtgagcctaggcccaggaaagcctccaattggcctggtgcagtggctcacacctgtaatcccagtactttgggaggctgaggcaggtgagtcacctgagctcaggagtttgagaccagcctggacaacatggtaagaccccatctctactaaatatacaaaaattagctgggtgtggtggcacatgcctgtagtcacagctgctagggaggctgaggccgaagaatcgcttgaacctgggtggcggaggttgcagtgagccgaggttgcaccattgcactccaccctgggtgacaagagcaaaactccatctcaaaaaaaaaaaaaaagaaagcccccaattaatgtgcaattacctaataatagaaagaataatcatagaaatcctcaacactgggcttttcggtggtaaaatgtatgtaacataaaatctaccatctttttttttttttttttttttttgagacagagtctcactctattgtccaggctggagtgcagtggcatgatctcggctcactgcaacttctgcctcccaggttcaagtgattctcctgcctcagcctcccgagtagctgggattacaggcacttgccaccacgctcggccagtttttgtggtttagtagagacagggtttcaccgtgttggccaggctggtcttgaactcctgacctcatgatccgcttgcctcggcctcccaaagtgctgggattacaggcatgagccactgcgcctggccaaaatctaccatcttaaccatttttaaggtacagttcagtggtgagtacattcacattgttctgcaaccatcaccaccatccatctccaggaatttttctcttcccaaactgaaactctgtacccgttaaacaataactccttattctccctactccccagcccctggcaactcccattctactttctgcctctatgaattttactactctaggtgcctcatgtaaggggaatcatgaagtaactgtctttttgtgactggcttcttttactcataatgtcctcaggttcatctatattgtagtatgtatcagaatctccctccttttatggctaaataatattccattgtatatatgtagcatattttgttatggcctcatatatgtatctgttcatggacaagtgggttacttccaccttttggctattgtgaatagtgctgctacttggcattgtttttaagatacattcacacacatcattatacgtgatcctcacaacaaccaggaaaatggaaaggcaagcatccttaccttattttgcagataaataaatggaattcagaaaggcgagtaacctgattagggtcgcagaattagcagatggtggaggaggaacagagtccaggtctctgcctgggtgccctgggagtctgccatgattccaaattgcctcatttccaaaggcgccatttgagcaaataaccctttttgtctgtgctcatattctgtccaaatattcttctaaaaagtcctcttttgagacaaagctatccattgatgaggacatcctctcacacatacctggagacaaaacatgactttattgacatgatgtctgaggtaatggtggactggggcccttttcctggtgctctctgcaggtaacatccaaagccatgggacatcaagctgagaaacttggaagaccttcaccagtgttccatgtgcacctgtaatgtccaccaagatactaaaggcaaataatgcaccaggattatgctttgggattcaccgtttcgaggggaattggcaattagggccaatatgagggctcatctttctagctctcatggggcccaggcacctcagtgtttatctgctgtgctcaagcccctccctgacctcaactcagcaactccccagtaatggagttaggaagggccagacattcatccccatcaaaacccagccttcttctgactgtcccactacaaatctaaggaaaagcaattgaacttttcttttgttgccatctgaaaagccccattccttagaattgaataatacagattctatcctttaaatttttttatttcaatggctttagggtaagtggtttttggttacatggatgaattgtatagtagtaaagtttgagattttagtgcacccgtcacccaagcagtgtacattgtacccagtatgtagtttttttatccctcatccccctctactctcctgcttctgagtctccaaggtccattataccactctgtttgcctttgtgtactcatagcttagctcccactaacatacagcatttggtttccattcctgagttacttcactcagaataacaacccccggctccatccaagttcctgcaaaagacattaattatttccttctattttatggataagcagtattccatagtgtatagataccacattttctttatctactcattggttggtgggcaattaggttggttgttggttccatatctttgcagttgtgaaacagatactatctagcaataaaatgtgaaatgtgaacaagtccattacctcagacagaaagtctaccctctgaaaacacagtagttacaataagaaggtgaatcacactaaaggtccattcagcccactctctcttgcagtgagtgagtgaatgagtgagatattccaaaaatatccaccatgcttttgtaatgtccaccatgatctcaaatgattaggaatttttcacaaacctcctatatttctctattaatatcccagtgcgattctcatatacttggagttttccaaatatttcgggaaactgctcatatttttaaccagtttatctatctaggtgttttcagaaaattcaaaattatctaactcaaagccacatagattttcctctctttctatggtaggttcgagattgaaattgagcccctgtttgccagcattgccctctacgatgttaaagaaaggaaaaaggtaagaaagcaaagaaaaatccatccctaaggcacatatattgttcatgattctttgcatgtatgtttttaaatttctttgcagcaagaacctatcagatttgaaagcaaatgatctttgatgagtccagttctgttgcctttgcaatttttcaagcagtggtctgagaatgtaatttatgatctttgaagaattttagagggagaggctactggaggtgctggcctggttggaatagagaaagaatgaaatagcgcatggggttatgtataaaacaaacccatttaaatacatttttaacaagcttggatgcgcatgtaaagcttcctcagtttgagagttctttgcactgtgaaataggctcatgactgaagggcatcttacatggtagaggtctcaatttgtcacagagttcagaccttaccaactgtaatgtgcttttaatgaaaacagtgaccaagacctctcgtgtgtttttaatgtttagtcattttgtgactcctagaagaggacagcaatagcaaatccagagtaggatggacacttctgcccttctttacccataatcattctgtatttaaggaaacaagcatctcctgcataaatattaataatcactgagatttgtaggataggttaactgctaaaacaagcagaacccaatctcagtggtttaaagcagtagttctcaaacttgagcatgcatcacaatctcctggaggacttgttaaaacacagattgctggacctcacccacagagtttctgattcagcaagtccaggtggggcctgagaatttgcatttctaacagtcccctgctgatgctgaagctactggtcaggggaccacattttgaaaaccgctggcctataagcaagaagttgctgtctttgtttctttaaccatccagggtgggaggagggacccctctgttccacgcagccactcagaaatacaggctggcagtggctcctccatcttcagtatgttctctccccaaattactcttgtcactgccattgctgcccctgaagaagagaaaagaaggatggaggaggcctggaagtttgatacattgcttctgctaacaattcactggagagaattgagtcacatgatcacccctcattgcaaaggaggctggtaaatgtagtctctgcctgggcagccactcaccactaaaattctcatggtgatgaaggagagaacccaaccatacagtggctcttaagtaatacgacactaagagagccaggagcactgttcacatcatgctcttgctcagaatcttcactaagattcattccctacaaccaggctttcttcatgatggcattcctctaccttctttccatccatagtctatgcagagtcaagctagaccgctgactaagcttcccccagccgttcaagcctctgagatatttattcatactctaatctctccctggcacatcatcaccttccacccctgcctatcagaatcttctaaggcccatccatctccagtgctgcttccatgaaaagttgtccttgtcacccaactgcaaatggcctgtcactctggaacttccacagtgcttctttgtatgcatgtggtgacttgtattttgcttttactgtagttagttacatgtttaccttttccctcacctttttttttttttttttttgagtcagggtctcactctgttgcccaggctggcatgcagtggggcgatcttggcttactgcaccctctgcctcccgggttcaagtgatccatcctcccacctcagcgtcccaagtcgctggaaccacaggcacatgccaccatgctggctagtttttgtattttttgtagaggcagggtttcaccatgttgcccaggctggtttcaaactcgtgagctcaagcaatgtgcccgccttggcctcccaaagtgctgggattacgagtgtgaaccaccacacccagtccttccctcattcttgattgtgaattaattgagagcagaggtcctcctcttctgtagtgaagtaactgatactcaggaaataccggtgggttaataaacatttaaatgtttcaaggaacatctctcaaatggctccagaatacctagacattgtgacaaaacatttgtcagatttatccaggagccactttcctaaaccacatctgtgattattacacttactccttcagcaaaatttctctgtggtgtttttactcctttttaacatgtttaaaccatgaatgcaacaggtctaacttatatttcactttgctgctcatttacagatctcagaaaattttcactgtgacctgaactctgaccagttcaaaggatttctgcgagctcacacgccttcagtggccgcatcaagtcaggcgagatctgcagtcttctcagtcacctacccgtcctcagacatctacctggtagtcaaggtaattcagtacgatctgatttgcccaatctgatgttttcattgctgtgttgttcccagcacatgtttggggtgcacgcaatctcagaatgtgtccacatatcctctgagattcactttgtttccttctcagtttaccccttttccgttctaagtaaactgtttcagatactagaaagactaggttttggagacacacagacctaggtttgagtcctggctttacaacctagtaattaaatggcattggcagtttcctggtctttctgagactgagtttcctcatctgtgaagtggagataatcacactgacctcagtggatagtcatgactacagaataaagcttggcacatcttgggcacccttctcctaattaaggagagttccctcagtgacctggtgcaaagaagctgctgtggagaaaggaacaaaatctctgggctagagtttcctaacgatgttcatgttgctctagagatgcatagttacgtgttcccaagtccagcctcttacaagctgaagcgtgggctgtggttttcaagtttcatcctccttttttttttttcttcttaccatgtcacagactgtctctaatgagagttgaaatctatggggcaattgtaagtagaagagcctttcattctaggctatactctttgctgttgtaagaaaaccagatcctttctctgtacaccaaaatgactggttagaaattaacaaacatcaggtattttacctaccttaggccagataattggtcttattgattcttttttttttttttttttttttttttgagaggagttttgctcttgtcacccaggctggagtgcagtgtcaccatgtcggctcactgcaacctccacctcccgggttcaaacgattctcctgcctcagcctcccgagtagctgggattataggagcccaccaccccaaaccaggctaatttttgtatttttagtagggacaggatttcaccatgttggccaggctgatctcaaactcctgatctcaggtgattcacctgtatttggttcccaaagtgttgggattacaggcgtgagccactgtgcccggccgtaaaatcattgtaaaaacaaaacaacaaattcaggtgtctgatttcatgtgcccccagcctcttaggtttggaacattatctagttagtacagtgttttatgtctgtagtctcagtgatcgccccatgatctcatggattccaaataattcaggtagctttgaggtcacttaacagatggcaaatgtcttttcactctagcttctttaacaccatataacaaagattatgagaggttactgtagcttgaggggaacttatttaagcttatagaagtatagttaaaattatattgctgaaaagacacttctattgttgtcaaacttcaatgtgtctccttttcgttgcaatattacttagacatacaggaaaattaaagcccactatgatagccctgtaggtaagttcacaattctctgtcagcctaggaaactgaagaagccaacactagttctatagagccaaattttatctcaaactctacttcccagtggatgactttctcttgattaatccgtcatattctgccaagtaacagtggttacccattggttcctatcacttactaaatatgttccaaaattttcaaatgtataaatgtgttcatttggcataacaaacatactaaagtgtttggataggtttaagaaattgaaatctactcagcaagacagcccctggttggctttctgtttgcttttctttatcgtaatgccatcattgttgcttctttccctttaaatatatagtaaatggtgttaaactatttagcacatccaggcagacattatttggtaagaggggcttctttcttttttgtttatattcccaggccgaacatcagggtctttactgtattttaggtagcatcatctagttcaggtgttgcatataatacggctttaagggattatttccgcttaaaagtttaattcaagattttgtgaaatttttttttaaaaagaatttgttttacaatcaaggaaagaagagtgaaaatgggattgaattggaaacttttcaaaaattgtttaaaaattggtatgccgtgcccaatttaaatatttcataagttgcgatgggcctatccttatgtaagggccacatagtttgagaaaacacaaagcagagagcctagcactttagaagtcttgcagatgttaaatttcccatcttaaagagtttacaatccagttaaaaaaacaacttggcattcaaagaaatgggttcaaattcctattttgctacatttgctgtgtatggtagcaagtttagtctgtcagtctaattggacaatgatccctgtgcctgagtggttttgaagaaaattgaaataatgtatgtaaaaacacctaccctgtacctgacataccataattaggtaaacaataaatggccatgaaatatgaaaaaaataggtatgccaagtgttaatcctaccccttctgaatagagcagaaagtagtctgttcccttaagaaaagttttaggttaatctgataggcttatttgccctactttccatggttatgaggagtcatgcatttcattacacacttttgcataaatcatgagggaacaaacaataggttctcatgtcggtctgcagctccttctcatgaagtacctggagttctccttgcccactgcagccagggcatagtatctgctggtctggtcaaatctgacttctcctgcttcctgtatgttccatgatacacactactagtgcatgaagccgtggcattccccttccttgcttcagggtcctaattaagaagttcttcatctctgttcagaatttattctaaagaccacatttttaatccattcacttcatggaaaaattagcttccttccaatttgttctacaagctcctgactatgagcttcaggagaatgggggcagtgtttatcgccaccttatctcccagctgctaccatatagaaggtactcaacaataagtaaacgattgctgattagcaggaatactggtcagtttctagctcaagtgttacgtgcttatgttttcagtgtggtgcatctctcagtgggattcgccttctcttcatgctgtggcaatgggagggggttttgaacttctttgatgagaagagagacttcctgcttggagtcctccctgaagcagatattcattgagtagcctcatgctgcttcctttgaaaccccataaatgcccctttatcatgggtattgttaaatactttgtgcctaactcacagcacctattaagtatgtgtcccttttgtactgtgttgacccaaattctttcttcaaggatcatctcaactgatgggactaaatccactggttttactcttcaacatctaagttaaattttttttgagcagagagttaggaaatttcaaatttctccttgtctttcttttaaatatggtgcccaaatttatgacaactggccagccagtcactttacctgaagcaagacagaagacacttcattcattcttattaccagcattcattcctatcaacagccagttagcaaagcaagaagctgcacatcccaatgcttttgagtttctttccaagtctgttaaatccagagaattagccctgataggaattacaagggagacaattacagataatttattcggttcagtcattcattttgtggaaggttttagtccctaacccaactttcacagagaccatatctcttttttacattgtaagcaataataaagaaaatgagttttccacttcctacgtatgtctcctgggttttgttttataaaataacttttattgctgtttttattatatacataatacatgtttattgtttaaaatagaaaatacacataagcaatgggaagaaaataaaaatcacacataatcccaccatagaaagttaactactattaacacttgctgcatttgctgagtatctactgtcacccttttaatatgcctttatgatttgttaaataaaattgtatgctattctttatataaattttttaataaaaaaatatgtatcacagatagcttcctatgtcatcaaatattgtcataaaatgtaattttgatggttgcatagattcctttttatggatgtaatttatgtgccttattttaatattctttttattggtagattgaaaaagtcctgcagcagggagagattggagactgtgcagagccctacacggttatcaaagaaagtgatggtggaaaggtatggtaatttgagtgttgttaaatggagacatcttagaagaagcaggtattttcagaagtgttacacaaatagttaatgggctttagtccctaatgtgtccctatataagacactactacattttaattaaataaaagaggaaaagaaaactggtcaccgatgatgactttttttttttttttttttttttttttgaggcagtgtcttactttatctcccaggctggagtgctggagtgcaatcacggccccctacaaccttgaactcctgggcttgaatgatcctcccccttcagcctcttgagcagctggtactacaggcacatgccaccatgcttggctagttttttatttttttttagagatggggtctcactgtgttgcccaggctgctctcataattctggcctcaagtgattctcctgcctcagcctcccaaagtgttgggattacaggcatgagtcaccatgcccagcctgatgatgattttttagagaaataaatccttgaattttctaatgttgacatacagcaaggtctgactgcataacttgattggggcaaggccaccccctgttgtcttcattctgaggctctgactcagctggttgggaggtccgtggagaccccaaaactaaacagtgccagagctctcctggccttcctcaacagcatgggccgctgccctttcaggtatgcaaataactgggaattggctgccactaccatgcattatatatattcattagcacagcataggtgttgagcctatgaaaaggatatcttttctcaacagcaatttgcaaagattcccagtgtgatttttaaaacatggccttggccgggcgtggtggctcacacctgtaatcccagcactttgggaggccaaggcgggcagatcatgaggtcagaagattgagaccatcctggccaacacggtgaaaccccgtctctgctaaaaatacaaaaaattagccgggcatggtggcacgtgcctgtattcccagcttctcaggaggctgaggcaggagaatagcttgaacctgggaggcggaggttgcagtgagccgagatcgtgccactgcactccagcctgggtgacagagtgagactctgtctcaaaaaaaaaaaaaaatagcctttctggaataagacttaccttattagtattgtactctacagactcataaatgtcaagtaagatttattgaactcaaggcattttttttttaaaatctgtcttttattctgaactcagaaagaacaccttggaagtattgtaaacttcctaaggagttgttaggaagctttttagaattttttggagttttccaaggtgacttttggagaaacaggttcacttgggagcttggtagatgatatactaaacttgatttcaagattcttttatgcaaatccaagtcacatagctagccaccaaaagaattgataatctgatgtaatgagtctctttttgttttcgttagctaaaaatgtattttactaattaaatgtagcctttttgtaaactcctcgttttttaatctttatttccttatcagctagacccaagtgcatcatttttctgcctattcactgtttttattttttagtgggaagatatgtttttactctttttaatcagtagggtttggattttggagatggctgtcatattcaggtcagaggcagttgacttggtgctgatgcttgtttcagcttgtttctttccattttcctccagagtaaagaaaagattgaaaaactaaaactccaagctgaatccttctgccagcgtttggggaaataccggatgccctttgcctgggcacccataagcttatcaagcttcttcaatgtctccacccttgagagggaggtaactgatgtggactctgtggttggtaagattttcacctgcagtgggaaagggagggctccccagtgtgcgctgcccaggtccacagcttactagcggggactgggggcacagtgaggtgtgggaagtggggaggcagaaggagataaatagaatgaaacactgttatgactggattacgtagatttggacggtgatctccaaaagaaattatcacgaacattggtgaagattaagtatactcttatagtaagattttctagatggtatgacactttaaaaagctgatttttgctagccacccgctctcaaaagtaaaactttaacaagaaaatgtagtaaccatctgtagtgtgttaagcagagacaccatggtcgactcctaaacctaaaaaaaaaagcctctgttacaaaggcttcaaaaagcaaaactcaacaggaacagggcgtggtggctcacgcttgtaatcccaccactttgggaggccgaggtaggcggatcgcttgaagccaggagttcgagaccagcctggccaacatggtaaaaccctgtctctactaaaaatacaaaaaatttgctgggtgtggtggtacacgtctgtaatctcagctactcgggaggcagaggcaggagaatcgcttgaaccagggaggcgaggttacagtgagccgagatcaggcctctgcactccagcctgggcaacagagcatgactttgtctcaaaaaaaaagaaaaaagagaaaaactcaagtttcccagcaaaatttccagttcgttaaagtttactttgccaagtgcaatgaaaaaatgggcatccaaagaatatttactgttttagtttatttagcatatttctttttcgtcatctcacccgtgatctgaatcattcattcctacactgcttggtgtagaaattttcaaaagggttgcaaattttcaagtagacctgcccatatcacctgtggtggggtttctctttccctaaatgcttttgtatccaccaaatatagaagtccatgttcacatcttttcatgcattccttaagctaaggcttaagccacttctgaaatactaccttgagcagggaagtggaggaaagggcattttgtgattgctgctgctattttggagttactggtacataatcaccagtcagaactcctgggttatttctggttcgtcaataacaaacctcactttaccacatcctgatcttcctgccacagctttctttaatgccgtctatgtagacccaagtaacttattgataagagttatgtatagagcttagagggcacacaagctaggtaattcaggatagggcatgctgaggcctcaatcatctctaggtcaaggataacctgacaacagagactgattcttaaggagcaaccagaagatgcaaagatgtcatgtattatactgaggcagaatggcaagtttaggtgggtagaggtagcaagaaattctaattcaacatcatggtaagaattaaggataagaagatactcaaagacgggttggaactgctctagttctaagcaatttgattatttacaagagaacccatgagtttttgcaatataaaagcaacaagatctccacccaaatcccaaaaggggataagaaacaactgggcaaactatcagggtcccagcccaagtctgagtgtgatttggggttctaattcccattgggcagatcacccaaggcagaaactcagtcttgctgcctggtccacataatgagagcagaggaatgctgggattcagagtgtacacaggctgaccccagcatgtttgggtcacaatcacaaatgccttcaggggcatttgagtacatgcctctcccagtggaatgcaaatatagaaataaaagaaaagcaaacactgtgctgactaaataaagcttatcaggagaccctgttctggctatagctctggactcttgccgggtggcatttgggctaccctaatttccatgtgggaggggcccatggctgctcctggcctctctcctctggtcggaggaggattaaggacaccaacaggaggactaagaaaggtaggggccaatggaaggacattttcattcaaaacaaggatggccatattcagtgttcctgatcagtgactttaatcatacatattgtgaagttaataactgctgtgtgtttgaacagaaaggcatactttggagtgacaattgtttttcttaaagggagaagctcagtgggtgaacggaggacattggcccaatctagaaggctttctgaaagagccctctccttggaggaaaatggggttggatccaacttcaaaacctccactctgagcgttagcagctttttcaagcaggtatctcttcacattacagtgtgtctggatttttccccatactggcatgggcactggaacccacaggaggaggatacgtagtgattaagagagcaaattagttaagctcactctcttagttcattttctgctgcttataatagagtatctgaaactgggtaatttaaaaagaaaagggatttgtttctttcagttttgaaggctgaaaaatccaaagttgagggcccacccttggtgagggctttcttgctggcggggcctctctgtagagtcctgaggtggagcacggtgagcagctgagcatgctagctcaggtctctcttcctgttcttataaagccaccagttcccctcccatgatgcagattaatccattaatctgtgaatggattaatccagtcatgagggcagagtcctcatgattcaatcacgtcttaaaggctccacttcccaacactgccaccatggggaccaagcttcaccatgagttttgaaggggacattcaaaccacagcattcacaaagcctcaatttcattagccagaaaacgggaacaatagtacttaacttcatgtggctagcaggaaggtcaggtgacatgagacctgtcaagctcttcttagagtgcctggaatacagtaagtgctcaatgaatgttagctattttaactgagagaagggttaggttttgttccttgtgataccaactatcctatttgaactatcttggccaatccattcattatgctatgacaacagtctggctgggccatctccttcccggtggatctcagggtttcttggcctggctattcatgtgcaagtttccactttcactactgcttgatgtgcaagtttccagggctccctgcttgctcagagagggtgaccattccagatggtactctttgttagctcagtaaacatcaagactatttaaaaaaataaaaaacttcctagacttgtcaacggtatagagacagaaagtagaatgacggttgccagggtctagggatagaggggtggggagtcactggttaaagggtacagagtttcagattttttttgcaagacaaaagcattctggaggttggttgcacaacaaagagaatgtgcttaacactactgaattgtgcacttagaaacaggtaagatgggccgggcgcagtggctcatgcctgtaatcccagcactgggaggccgaggcaggtggattatgtgaggtcaggagttcaagaccagcctggccaacatggtgaacccccgtctctactaaaaatacaaaagttagccgggtgtggtggtgcacacctgtaatcccagctacttgggaggctgaggctggagaattgtttgaacctgggaggtggaggttgcagtgagccgagattgccccactgcactccagcctgggtgacagagtgaggctccatctcagaaaagaaaaaaaaaaagaggtaatatggtaattttatgttagttatattttgccacacttaaaataaactcgcttggtctgactctgttttggaaagttttccatagctacgcagtcttcgtggagcatttaaaggggttacattaacaaactgaaatgcaaaagggatgctgagggcgcctgtgcaccgtgccacatcatagaaatagtaaaggtctgaaaaggtttctattcagcatacatgtacccttcccaatcttatgaccttggaggacaaggtacttaactaagtctggatggtctcactgggaataagacatatctacccacttaccttactgggttgttgtaaggattggagatcatgcatgtgtgctcctgacccatcttgggcatatgtgggggtggacagcatttatacttaaccttgttcgagacaaatgtgaagaaaatgagatggaaagatgctttctccaccttcgaacatttgaagaagaaagtaaacttattctgtattgttccggggggtaatactggcatcagagggtgagagttatcggggggaagcttttggcctggttttctaatggtcagacgggcttccttagaatgcagcagatgccccatccccagaaggactgataagaggccgaggcacagtgagtcacagtgattgagaaggatttaacaagaagtggagctcagtgatttcagagctgtctataatcctaatttctatgaaagacttgtgagaataaaacttaaaggtaaaaatcttcccagaaatcgtttgtccccaacccaagagtcaaaggtgcatctacattaactctgacttttctcttggcaggaaggagatcgccttagcgatgaagacttattcaagtttttagctgactacaaaagatcatcatccttacagagacgagtcaagtcaattccaggtgtgaatgacttatctttatcctctttagctgtgccaaaactgcttatcgttagacacagtctttgtctaatgccagaatttataaaatcatgtttgccaagtgaaatgtgagattttgtgttaggggttaagaatctgaattgttctatgtctttggcaaacctattaatgtttttttaattttcttaaaggattgatttagtaaacaaaccttgtgctttagatctggtttctcagataatgagataattgtttaaacagaggagcccctttaatcaaataaaatattatacttagtattaaaaaagtaaatgtgagatgctttggtagaaggcaaaggcatcttccttatcctcactcggcagccctggaggtacttctgtagcatcctcaggtccagggaagccagtttgtgtttgtttttgtttttttgagatggagtcttgctctgtcaccaggctggagtgcagtggcacaatctcagctcactgcaacctctgccttccaggttcaagtgattctcctgcctcaacctcccgagtagctgggactacaggtgcctgccaccacgcccagcttattttttgtatttttagtagagacagggtttcaccatgttggccaggattgtctcgatctcttgacctcgtgatccacctgcctcggcctcccagagtgctgagatgacaggcgtgagccaccacatccggctggaagccaattttaaaactcccaatttttactgctagcaatgcagggaagttacttaacaatgtaaaattatactgtggtaattcaggaaagaactttaaaaatcctctaatccattccttctcattttacaatttcttgctttatattttattttatagaggctaaatctcgaaagttatcatgacacacttttctcaagctgtaggaaattagctccaaaacttttttacagtactatagtttgttcttattttcatgaaagaaacacagtgcaacaatctttcttgattccctcataacatgacagtttctttactagaacattcctattttctctctttaggcttgctaagactggagatttctacagctccagagatcatcaattgctgtctgactcctgaaatgctgcccgtgaaaccctttcctgaaaaccggacacgcccgcacaaagagattttggaatttccaacacgagaagtatatgtccctcacactgtgtacaggtaagaaacacaggctcgggctgggcgtggtggcttacaccataatcccataactttgggaggccgaggcaggaggattgcttgagctcaggagtttgagaccagccttggcaacatggcaaaaccgtgtctctacaacatatacaaaatttagctgggcatggtggtgcatgcttgtaatcccagcaacttggcaggctgaggcaggagaatcgcttgaacccaggaggcagaggttgcagtgagccaagattgcactactgcactccagcctgggagacagaaccagactctgtctcaaaaaaaaaagaaaaaaagaaaagcaggttcttggaaaaccgttgagctcacattctgagttttatttgaataacgttttctcatccttcaacctgtcttcctacttcctaagtttcagggaaatgaaatgtgatatttatgtaaccgtaggtgattgccaaatctctttctaaacatagtttacctaattctctttaacaagaaagggttacttcagatgtaattgtagtttaggattatagtggacatatgttttccagagattaaaaaaaaaatctgctagccattacctttgttctcctctgtgcagagggacatattagaaaaagagcaatgtgaccaaaatgtgctagttgtcaaaaggacaggttttcagctaaagattagctctttccaacagaatttacagcaataacataataatagcacacattccaatagcatttacagcaataacagaaagttctgtatgtgtgccagcagtacaatagccactaatcacatgtagctgttcagcatttgaaatgtggccagtgcaatggaggaactgaaaaattgattttaattaattttaatttaaagtcaagtaactgtatgtgtctactatattggagagtatggagctagacactgaaggcctaacaggttgggctgccttggtttctgaatcgcttatggtggcacctgacctattccatggggtctggaaggagtgcttgtcaacacatatctgccaaaggcattaatgctcatgcacttctttattttgagactatttcctttaatgcagaaaaggatgccttctataaaaatcatctcttccccaccatccagaaatgacattgttgttttctgtgtttttatataaaagaaatacagtggtactgattcagttgaagtcttcttttatccccagtctccagtcacagacttttacctcacctcctagacttttatcatcatgaaattatgtatttcctattttttctccttttacacacacttacacacacatctgtgaacgctcaatggcattatcttcatattcatttaaaatgtacgcaaatgacttcacactctaggtcaggggtccccaacccccgggccatagaccattactggtccttggcctgttaggaaccaggctgcatggcaggaggtgagcatcgggtgagtgaagcttcatttacagccactccccattgctggcattaccacctgagctcctcctcctgtcagatcagcagtgacattagattctcatgggagcatgaatcctattgtgaactgcatatatgaggcatctaggttgtgcgctccttatgagaatctaatgcctgatattctgtcgctgtctgccatcactttcagatgggaccctctaattgcaggaaaacaagctcagggctcctactgattctatattattgtgagttatataattatttcattatatattgcaatgtaataataatagaaataaagtgcacgataaatggaatgtgcttgagtcatcccaaaaccatcccctgccccccgctgccaccccagtccatggaaaaattgtcttccatgaaaccagtccctggtgccaaaaaggttgaggattgctgctctaggtgttatattacactttgtttttgtcactcaaaagattgatttgtttttcttttttctttttttttttttttttgtttgagtattactatggagtcgtgagtcatttttctttctacttacccagatttccacaagttttaccaatgggaactttttaatggcttgcatttttggaaatatcagtattgattcatgtaaaggtttgtgggtttttttggggtttttttcgtttttttgtttttttttgagatggagtctcactctgtcacccaggctggagtgcagtgacatgatctcggttcactgcaacctccgcctcacaggttcaaacgattctcctgactcagctgcccgagtagctgggactacaggtgcctgccaccacacccagttaatttttgtatttttggtagagacagggtttcaccatcttggccaggctggtcttgaactcctgacctcgtgatccacctgcctcggcctcccaaagtgctgggattacaggtgtgagccaccatgcccatcctgttattccttttaactgctgtttagtattcctttgtgaagaggccatattttattcatttccttgttgatacgcatttaagtctttttcaagttttcagctcttacaaacactatgaagtaagattttttgtctttgcccctctgtacacgtttgtgaaagtttctttaatatatctaaaagtgaaattaccagatcacaagtaatacacatttcagtcttaagttttctaaaattttacatttgcagtcctaacagcagtgtgagagaattcccattttccagttcctcacccatactttccagtatgacgtatgtgggactaaaatgcaaagaacttcagagctcacctgatccaagcattcccacccccacatttccagatgcacaaaattaagacccggaaaggataagtgaatggttccttgaggtcaaaaattacagcgaggtggccagacacagtggctcacactgtaaccccgctgctttgggaggctggaggactgcttgagtctaggagtttaagatcagcccgggcaacatagtgagacccccatctctacaaaacattttaaaaattgcccaggtgtggtattgtgcatccctgtagttctagctacccagaaggctgaggcagaggattcttgagcccagaaattcgaggttagccttgtgccactgctctccaaatcaagcaacagagtgagaccctatctctaaaaaaaaaaaaataatttagaaaataaaattatactgagaaatacaaacagctattcacacaggaatggagagttcttctttacagtattcaggaggtatacacttatttccccatttaatccttcctggagcagctcttcattttcaatcctcattccttacatctaaacttagtccccacgtctccctcctagaggagataagcattctcaggatgcagtagtttcgattctctattccttagaggaagatgaaggcatgaaaatgtttgcttatggatgctttgtatctttttagaaactttatcctataatcgggaaacaatgcttgtggcattggaagagacttgcatccaatgaattctgtagttattcaacttcccctcagcatttaatcacccacaggtggcatttacaatgttctctactcgttcctgcaaacattatcccttaattacatcacagtgggacttagagtgcattagtgcactgaatgatccagaaatgtaggagggcaaaggaggacaagtctggacggattacaatggacccaacttgtcatcatgagaaacagacccacaaatacagagttaatcttcttgagctgtactggccactgtagaagtgccaaggacaccccgttagaaatgccaaggccaccctgttagaaaccaggtcttggggaatgacagaagagatttctctccagtttggttgtggccccttctcttggctcacagttcttctctgtggctctcaggccaccatattttatagtctatttaaggaaagagagagataatgaacttggtttggaatcttacttcatgaaaatttcacagaatttaggaagcatcttgtctaaatatcttgttctaaatttttagtgttcttctccagtccttgtgtgctttagggtggttttgattagattgggcttgacagttacccagtcccagatgagtgtcccctttcctgcacctccccccattcacgacatggaaatggaaagaatcgagtgaggtctgaaccccaggtaaaattggcaagctgactaagttcgccttgggtgacctcaccttttcatttctgtccattttcctctctttttgttccttgccatctccccatatctcaaaaaacctggaccttgtagcttttctatactggcccccaaaataaaagtctcttttcaagcaacgatctctaaactcatttgctatggtattgataacaggtatggattagtcttatcactcccaagagtattatcattttgggccaggtgtggtggctcacacctataatcctagcgctttcggaggccaaggcaggtgaatcacctgagtgaggtcaagagttcgagaccagcctggccaacacggtgaccccttgtctctactaaaaatacaaaaagtaactgggcgtggtggtgggtgcctgtaatcccagctactcaggaggctgaggcgggagaatcgcttgaacccaggaggcagaggttgcagtgagctgagatcctgccattgcactccagcctgggcaacagagcaaaaaaactctgtctcaaaaaaaaggtattatcttggcagggacagcagttcctatttcttaattgaagaaatccagatttcttctcattccaagagtctgtcaggtaactttcactgttgatgttgctatttccatgccaatcaataatcctgatcatacctgtatcccttaaggaaatcaaataactgaaaatgaagatctgtggggcagataaattcaggaatatttcttcgtttatagaggattcacctcatgaatttgaaatatggcttggcttataaaaagttgatctgcctggagcttgtagctaacacctctgtcgggccaaacaataaatgcttacactgagaaagccaggtttgggatttcaaattaatgtgcccttaacataaactgcagagcccccctgggtggagggaactattacctggttctaatagcagatgttttctggccttgagtgccagtggtaaccagagtcacacattttaggattttggtattgatgagggtttcagctgaatattacttgagttgaactccagttatctttacctgtcttaaaggagcagctgccatagtgcctcaggtaaagttggcttgggataggctggcattgccttccagtccccagcctcaccttcctcccacctcttcactgcctcttttctttgccctgccccttcaggtgtcctgcgtggggcaccattcgagttgcattctagtgtattaggttggtgcaaaagtaattgcggtaatgtgtgtgtgctgccccgtgtctctaccttattcaagtttctttaaggaacagctgtagatgagttctggtagaactgggtagtgctcccagaagtatccccgtgggtccgtgagggttgggcattcataaaataaatccttgctctaacgatagagaccaacttctagagccagaagtgctcatcccaggaatgaccaggggctcccaaaccagcggctcgggccctctgcagtgccatgtgcagcctctgtgggttagaggcatggagctagagcagggtcctctgaaccagagccaggcaggacactctgagaaatcacaagcagaaggacagcaattctgaaagcagagcagaacagctggaaaaactgagctgatgaaaaggattatccgaatccaagcttggcgttccttgctctgtgtccagattaagaaaatgctagtggtttgcctaggaacacatttgcaccaactcctggcttattttccatgtgacccaacagctggtactagagacaccagctgctttctggtgggggcagaatgaaaacagcatgggctgaggccaaggcccagcaaggtcttcaagggcatcctatcctgcggccgccagaggggtatgtgcggagatcacaggcaatgaggttgtaatgagctgttaagctccctgccgtccctttaatgggtgattacagtaaaaagagccacataaagtacgttttcatctctcacttcagcccccgagagcctctgaggtcttgtttatccaattatcagacttgctgtggaggacggtgcttgctgagaacaagcatatcagttggaacatgatttctctgatggataattagctgttttcaggactcctcctattcagctgaatgttctcagaccagaagtctgatctggcctaacggggatgtgctcccatatcgcagtggagtcttaaggagtactacccaccttctcttctgcgggggaaaaggaatggcgtagcatgcatgcaggacctgaccggaaggaatgtctgcgagttatgatttagtgactagaacttctaaggaaagaaatgaaccagaaataactgcaaacgaagtggttaggaagaggggcaggacatggggagtatccttgaaagggacttaatttcatccaaggaaataggttcccagtttaagcccagttagctctgtattcagagtggatcttctcagtgctaggtgaaggaagggtggttgtgcatcagagtaagtgtccagccccaccctgaagactcccattcaggtggtctgggatggggcactggtggtctgacactctcttttgttcaaaatcaaagcgtccccctccttctcatggaagggaagcttccaccaacccttaatgagttcctgtaccatatggagttgtcaaatgctccataccgggcacagcggctcacacctgcaatcccagcactttgggaggccgaggcgggaggatccattgagcccaggagttcaagaccagcctaggcaacatagcaagaccctgtctctacaacaacaacaaaaaaattagccaggggtgggggtccacacctgcagtcccagttacttgtgaggctgaggtgggaggatcgcttgagccaggaaggtcgaggctacagtgagccgtgatcatgccactgccctccagcctgggcaacagagtgagactctttcaaaaaacaaaaacaaaaaactctgtcctaagtatcagatgatgcggaagcccagtacttggttttactaggcttagcaagcagtcgcttatggaacagaagcttttataaacaaaccatgtagttaggaagggcagtggcagcccaggcaaaatctagtcatttgaattagccaaggaacggagacaaagacaaagtgaatttctggtgctagttgcaacttggtctcgataataaatcaggaacacaatccccacattcctaatgccttgctccaaaactcagcaatcctcctatttgtaagaatgaaaaaattcaggagggaaccaattgcctaaggttatgacagcaaagctaccgttccagtataatattcagccactagaggacacaattcactcactttctagattcagacacacgactacctttttcgttacaaaacatatgaagtcgtgatttatgaaagtaggacacatattgtattttttgcccttgaagtgcaagaccaggaaaaactgaaaagtattgcagcatcctccgagatcactgttgtcattttttcgcaaaggattttattctagcctgtcagtttctgcctcctttcattagtaagtcctgaccttagacatctggcatttttttggaaggtgtagtggggagggggaccaagagatgcatcccttaatgtagctaaagatcgaaatcttctcattttggggagagttgcttactatacatatttacacattcaccaattttgtctcatatgtaaaccacagaatgtgccgaattttcctagaatcatggttgaggcaggtaggagtaaggaggtgctgtgtacattagtgtcactgattccaccgttcacaactccataccactctccttattttatactcttgagtccacagtgctttggtgttacagcccatatagaacggtcctacctaaaagtcctgcggtcggtttaacagtgacgagtgtcatttttccactgtcctttacatagaattcagcaggaagcttcatgaggcaccctgtttctacatgagttgccctggttggtggaggcagaagcaatggagaagtggtgatgaaattaagtcaaagttaggcttgcatttgactctgatcttgaatagtttgtctagattagagggagcacctaaaatccaaaaagccttttgtctttgatttctatacttttgttagttttacaaattattatttaaaatcagtcctttgaagtggcttcttctcttctgacgggacagctttgggaaactgtttagtcttatttcttttgctattgggaagttgtgggggacgctattttgcagctttttcatcctcagttctgacctcctcatgtgctttacagatgcccccaaaggtcagcattcatccacctttcactgagagtgtttggccatctctaaagcagaggtattttaacagctctccttaatggatgtcctgtggtttcaggcctcagacaggctgcccttgggccctcagcagaagtcgggaatcgtcttatacttccagatcgtcttttactcaggcaaaatatgagatgctgtgtcagggtttcccaagggaagaaactgagtgggaggtgcaggtaaaccccacagtacaaaataaaacagagctgtgagtagttgaaaggactgtgttttgacagcgtaataaggtaattgtttaaaaccatggctaattcatcagatgtcatgtgtcttttatagttaaaagatgaaatttctttacccactggtgtcaacaacagaaagattctaaaactttcaaaaaatgtgccagtcctggctgctttgtttcatgttctttgacaactttcaaaatgtaaattgagattcatgcaactattaatggaaatataaatatcatggcttcataaggataaaattagaggagctcaacataacggctcattttaatgatttctaaggggtttccatgcccaggctaataactgtacatttagcaataagcaaatctcaaagcctatttcttatctttccctagaattacagcttttaagcccaagctggtcgttccttttataccactccactcacttgataggggtgacatgggctgagctttctctcctatcagggctcaaagacaagtttagcagcgtttctaaacttctgtcaatcagctcacaggacacagaccagtttcgttatcccattaacagatttacatttctgttctctggaagtgtcagttaatgtccttaaaggtaatatacacaaatgtacacaatagtctctgaatttttctcagaagacacactcagaaaccttagaattctgattcattctctttggctcagacttggatgaatttgcttctcagagtagggacatgaaaattattcttaatttatacttcatgtaatctgtttcttctttctccctccgccgccctccaatagctcttctgagcttgtttgttcttcccctaactcccattgttgaaaacatggcctcccctcattctcacctttccaggaatctccttgtgctcctcaagttcggctcatcgcaaacttggagttctgttttctcatgcccttctttcattttcttcttttaagagacaggatcttgctctgtctccaagattggagtgcagtggtacgattctagctcactgcagcctcaaactgctgggcttaagtgatcctcccaactcagcctcccaagaagctaggaccactgctgtgtgtcaccacaccagctaattattttatcttttctagagacaaggtctcactctgttgcccaggctggtcttgaactcctagcctcaagcaatcttcctacctcagcttcccaaagcactgggaggtgccactcttcttgtgttttttacctttgcatttatttcctggttacaatacttttaacttaatggctgctgaactagattctgccaatgtacgtgccgtccaggacacgttcatgccactttaattttcttagaacatcaatgagatagtcttactagggagagataaagggcaggggtttggttttctggcaggttttctttcattttaataacgagccaacccacggaggaaggaattgattgatggctgcttcctcttttgtaaagaacaaacatcaaattagtggtttgtcctcactttgcggataagcagaataataacacctgtgcctctccctgcattattttgaaactaatataattttgtttggacagaacgtagatagcaaccttaatggggaggaatgtggaagaggaattactgaagggggaccagtcagcctgtcaggcagcaactctggtgccaaagaatggacataggatcagagctgtggacccccgtcctgtttgtaaacttcctgagggtggcagagattcataccctttctcccatcaggacaaaaatcagtgtgttggagctcactcaggaaatgctctttgggattggcatgggaaggggatgaggccgattgacaattagcctagttcactgggattttgttgtaggagctgggtggtggcaccatatggccaacaggggatgccagcgacatccctaatttctctggcttcctgataggtcctggtagggtcggggttccaccgggatttgcctagtatggtctacctctgactgaaattaaactctaagtaggtaactggggaacgcctttctccagagagaaggttttgatgtgatctcatcatcggggactggattggacctggagaaatcagtttttctatagtcttgtttctagagtggcaccctggtcttgggcaggtcagaaggacagatagttggtcaccatcttcaacacaaatcatggctggaaaagggccccagtagggagtgcctttctcactcaccaatcaccaaggctagaagatagtctgcagattctttcagatgccacaaagctgtgattacagctgcccattggcaaatcaggtactagtttttgttaatcacattgcagtcttccttcactgtttcttcccctggtcccggaattaaggctgggctccatttgacaagttatcttctgtgcaggtagagcagcaggctgtgttagctcacagcatctactcagtaggcatggaaatatccactgaatgggactgagaaagtggaatgggaggggaacgtgtgaagaacaggaagtttgcctctttatgtccaaagtctgtctacttagagcaacaggatggtgatgatgctttctggttaaagatgtcatggcaacagtcttccctagacagctctctagcaatagccagtggcatgtaaaccctgcatttttgcactgtatccagtgtttgcaactcccttgtagaactttccctgaagtcagcaagaaccctgtgagaatcaggatttgtctagaaatttagcatttacctaatcaatgattctctagacatgtcagtacctccaagtgattcatatgcatgtttggtgggcgtcgagcatgtggcagtttggagaaggaagtggagaatgcagcagcagcaggagaaatgtttgatgttgctaaacatcaaccccacagcaagcctagaactcggggaatgggaggcatggtgcgggtagctgctgacacacagctctagagatagctgcctgcaaagctggatgggactccaggcaataggcttcagggcctaactgctctttcaaggtcactgattgttacaggagccatggtctgcagcattgagcatggaattattattactattaagcatgatcctcaccgtgatgctcttggggtggaacaaaagagcccagagagaatatgcttattttatgcaacctctaacgtttcctcccagagttgtgatgaaactgaaccaaactctagcatgagaatcggcatcccaggccagcagccaaaacaagtggtgacacttggccaggcacggtggctcatgcctgtaatccctgcactttgggaggccgaggcgggtggatcacaaggtcaggagtttgaaaccagcctggccaacatagtgaaaccccatctctactaaaaatacaaaaaattagctgggcgtggtggcgggcacctgtaatcccagctacttgggaggctggggcaggagaatcgcttgaacttggaggtggaggttgcagtgagccaagatcgcgccactgcactccagtccagtgacagtgtgagactctgtctcaaaaaaaaagtgccgatactttatatatcttctgaaagaaatgaagtctgtaagaaggactgttaaccctcagaatggtctggggatgctacatccccttgtggacttgtcacactggtatgagtgtagggagtgggaacacttcttctcagctccttcctcaccatgtgtcattcagggacaaagggagcaggatatcttccctttgaaaaatctcatatgcctggcaatactcgtcaccctgtgaataatgttgatgcattcacctaaccagtattataagcccctgctgtgtgtcagacactatgcttggtgctgaaatagacaaggaggggactgcctgtcttggaaggcaaatcccagtctcctaagagacactagaaccacaggcaaccatgctgatctatgcaatgacatgtaatgcaactttgtcctgcaaccaccttgagatctttgaaagttctcctacctccaaaactcagacaagtcctctctcttgccaagtgcctaaagcaaggatatgtttatagaggcagctgggggcatctggccaatttatttcccagcagacctgctgcttcccctgattccaatactttcttccccaacccaaaccaaggcgtctggcaatgttaaaaacatcaagaatgataaaacaagcattttaatgaagattattgatgtattcattggctgtttctttaaatgggtagagaactaataaaggatctaccccaaataaccaaaaatatcagcctcagcaccagcagaaattggaagcgttctggtatttatatgtgtttttctcagctggcagatttgttttaggaaactatttgcaaagcctgggaaaaatgtgctttctctgtctgttaaaggaacatgcaggttggttggtgctggttctccatctgacagttctgtctggtggcctcaaaaaaaaagaaaaatacagcatagtccagatttggactatgcaaatggtgtcttgaaacttaacttttaggtcttgagcaaagccaagtattattgaaatgtttattttgtttttatctgcaggaggttttcattcaaaatgtggtgctttgggggaaaaggaagggtgtttgtactaggtactttttagcattcttcttattatctgacctatcacagcctcttcaggagacattaattaatttagttcatataatcaacactggaaccaaggaaaaattatttatacttttagaaattctcatgttcttatacttctttggagattgaattgactccaaagagactattttgtgattaagaatatttttgtggccgggcacggtggctcacgcctgtaatcccagcactttgggaggccaaggcaggtggatcacctgaggccaggagttcaagactagtctggacaacttggcaaaaccctgtctttactaaaaatactaaacttagccagccgtggtgacgggcgcctgtagtcccagctactcgggaggctgaggcaggagaatcacttgaacccgagaggtggaggttgcagtgggccgagatcacagcattccactccagcctgggaagaatatttttgtgtggggagtcgttatattatgtccttagaccaggaggtccaattgaggcagaaatttttgaagtaaaaccattttttttgaaggaaacacatatttaaatatcaaagaacactggacgtatacttttaaaaatttacatacttgtgttagttatctattgctgtataacaaaacctttgcagctcaaaacaacagtcattatctcacaagtttatgtaggttacgcaggtgcagctgacctgcttggtctgagctttcgaaaagtgcagtgaggatgtcagcctaggctgccgtcacctcaagggtcccctgggggtggatccacttccaagctcactcatgtggctgttggcaggatgcagttgctcacgggttgttaggctgagggcgtcggttcctcactaagccagaggcttccttaagttccttaacatgttttctcatggggggcagctcacagtgtagcaattggcttcgtcaaaacaagcaagcgggagggtaagagacagaaagcaagacagaggccagggtctttcacagcctaatctcaagagcagtacctcatcacttttgtcctattttgacaaacgtcgtattgacttttgtcactacatcagaagcgagtcactaggtctagcccacactcaaagggagaggatttcacagagcaagaatatcaggaagcagaatcattggttatttcattagaagctgctggcacagttcttaatgaagctacaaaacattgaactgggaggaatatgggggtaggagggtgacagggagggcaggttaattttgtggatgctgaggacaacgtgcctcatgaaaagtgttcccatcagactggtgtatttctgtttcttttcttttttttttttttttttttttttttttttgagacagagtctcgctctgtcaccaggctggagtgcagtggcacaatctcagctcactgcaacctccgccttcctggtacaagcgattcccctgccttagcctcctgaatagctgggattacaggcatgtgccaccacgcccagcttattttttgtattttagtagagactgggtttcaccttgttggccaggatggtctcagtctcctgaccctgtgatctacccaccttggcctcccaaagtgctgggattacaggcatgagccaccgtgcccagcccagaatggtgtatttctaggacatctgcaatgcatcactctctaataaaagaaaaaaaaatagccactccttgacagatactcaaaggtgtggagtcccttactaaaccacactccaaagaaataagcctgcaaaatagggaaaagttgttttttacctagaaagcagattctctgcattttcttattttcaaatagtggggagaaaccctaagctgtacatatgaaggaatggattcatttctcctcttgcacagcaccccagcaccttgtacaccctattcctccctaactcccaaccgcacactcacctcccaagcatctgcagatctacatacatattatcaaatgtacagagtactgagtgaaatggtcactgtagctatggaaaggtgagatttgcaggctgtctgaaatgtttcttgctaaagtagttccaatccttcccccatttagaaaaaaatacattcttagtaaatgactttcaggcagaaaaagaaaaccacactggaaataggattctaataaaccaacatggggctctagctggtgaacatatttctgagccatccctatacagaaaccacaagacaaataagaaaaagtaaatccagatcacttagacccttcaaaccacatcctgggttccaaggacagtggctgcgagttaggaaagatacatttatccagtggaccttttgactgtcttgtcaatcttaagaaaaaaatgtagagtaaaaaattttggctgggcgtggtggctcacgcctgtaatcccagcactttgggagaccgaggcgggcggatcacgaggtcaggagattgagaccatcctggctaacacagtgaaaccccgtctctactaaaaatacaaaaaaaactagccaggcgtggtagcaggcgcctgtaatcccagctactccggaggctgaggcaggagaatagcgtgaacccaggaggcagagcttgcagcgaggcgagattgcaccactgcactccagcctgggctacagagcgagactctgtctcaaaaaaaaaaaaaaaagaaaaaatttggtttgggtcccttcccaccttcccttgcttcatcactttccttaagcctctaagcatccagatcttccccaaagcagtgcttcctagtcagtgattaccctatcctctttttattccttttcttcatgcacaccttcagtccataaatccaagctttttgtaaggagggagggtgagtaaaccaattcatactaaggtgagagtgaattatatataaacctcttaatatattaaatctaccaagcagtgtttcagaaggaaatctgctaacatgggcatcttacttgaaaaaaatttcagttggttcaacaaagtatggtttagaaatcattttcaatcaggatcggggagagaatttttttttttcttaaagcagttaggtttccccagcagatttcgaatgcttggatatttgtgattcttttctatgggaatctgatctggataagacctaagaccataaacactctagctttccctttgggtctttgctattgaaaactagttggacttaaacaagtgaagtgggttttaaggatggctcctttcacccatttctaaaagatagcattcttgagggtctgctttatttagcagaaggaatgctggttttccaatctctcactcaaaaggaacttttacttatctcatagaaaagaatgggatggagattaatgtaatagaaaaggtattctacaaatatcatagcagctatatttaatcaattcatgttcaaagatcaattagtagtaataagagttgtgctgtataaaatcaccatatctcatattcaaattgcagatcatcagttgaaaaagcatggattgttttctcactgaaagaaatctttaaaagtggtaccataagagacattaagactggctattgttttatttctctctctctctctttctctttctctctttctgtcatttgatttctgactttcagtggatttttttaacattacaaaatcatagagaaagaatattggaccatttattgtagagtttttaaacaatttgataccattttttttttctggcgtcttaactgcatttgctgtttgtgaggggtgtagaggtccctgatgttcagagtacagtaccagcgtttatgtgaaatattgcagcctggcctgtggaggacaggggttactaaggggcaagctgctgcttgcgataacacccccagtgcctccttctaatcttgcgccatttcccagggcagacagccttgtggggctctgactggtgccctggaacatgttttaccttccatttttcttgctctgatttctgaagacagaatgttctcttcaacctacacatcaggagttttccttctgttttcctttttcactggttcctttgtgaatttgcacttttatctaacctaaaacattggaaacaggaataaacacaaataatggcatgaggccgtggccacagaatgacaagacaggacacagcaaatgttttgggtttttttcacatttatgaaccttctcattctatttatttatttatttacttacttatttcttgagacagggtctcattctgtcacccaggctggagtgcagtggcatgatcatagctcactgcagccttgaactcctggactcaagtgatcttccagcctcagccttctgagtagctgggattacaggcatacaccaccatgcctggctaataaaaaaaaaattctgttgtacagatggggtctcactatgttccccaggctaggctagtctcgaactcctggcctcaaacagtcctcctgccttgacctcccaaagtgctgggattataggcctgagccactgtgctcaactgcttcccattctaaaaagtgtctaaggcagttatagaggttatataacaaggtataaaatttctgagtgaaaggaaaataaggagagagaaataaatctaagtgtgtgtaaggttaatatgtacacagaatgtttattaaggcctttgacagttcctttaaaaattacctgcaggccaggtgcggtggctcatgcctgtaatcccaacagtttgggaggccgaggtgggcggatcacttgaggtcaggagttcaagacaaacctggccaacatggtgaaaccctgtctctactaaaaatacaaaaattagccaggtgtggtggcatgtgcctgtagtcccagctacttgggaggctgaggcaggagaatcgcttgagcccagaaagtggaggttgcagtgaactgagatcacgccattgcactccagcctgggtgacagagggagactccatctcaaagagaaacaaacaacaacaacaacaaaacctgcaaatttgagctgcctagcagccaagcaataaagggaatcacaatgaacgataagattcatatatctgccaatttaaaaacaaaccagttctcttgggtcagtgcttctcaaacttgaatgtacatttgagacacctggtgcattgttaaaatgtaggttctcatctagcaggtccatggtgcatttctaactggctcccaggcaatgctatgctgatgctgatgctgacgctgacgttgatgctgctactcattggactgccctttgagtagtaaaattttagctcactcagaaaaacctcatagtttatttggagtaacatccctttagcccttgtagatattataagactacattacaataaagttctggtgagtctaattgttgaccagagagattgtttacttcagagcacctggatttgaattgcagtgtgccacctgctgctgtgttacctggtacaagttaatgcattctcttcacacctcagttttatcatcttctgaatgaggctaatagtagtacctgtcatagatgcttgtaacagtgcctgcatagagtaagaatgaaataatgttagctattttttattgttacatttaaaatagattttgctggtagtgaaatatgaatgataaaatcatctcctcagctgttttccttgcataagtaccttaaaataatgtatttgcaatttccttctgaatccttgaataaaagacaccagataatcagaagatgttactgacattagtaggcatttgaagttcactctgatgggatcagtctatttacaacaaattgctatagagagtaaaaagcgccaaccttttcctgtagtttttgaatgacagcatctttgttcatgcagttggctttgctgcatttccacttcatcaattttttggctctgtctttgcaaaaaaaaaaaaaaaaaaaaattacagagggagaattttaaaacacaaatgaagaaaaagaaattactttgaaattgccaaaattgtttggctgaaagagcttatttagaaaaacagagctttttatgtataaacctgtttcattggtgttgtatcagaattgcatgttgctagtagtttactatcaaaacaacacttgtgtttcaagctgttaaaaaatgaataaaataggccaagtatggtggctcacacctgtaatcccaacattttgggaggccgaggcgggcggatcacttgaggtcaggagttcgacaccagcctggccaacatggtgaaaccccatctctactaaaaatacaaaaattagccgggcctggtagcatgctcctgtagtcccagctactcaggaggccgaggcaggagaattgcttgatcttgggcagtggaggttgcagttagctgagatcatgccactgcactccagcctgggcaacagagcaagactccatctcaaaatttaaaaaaaaaaaaaaagaataaaatagaaacactgatttttctggtattttatacccttccccgaatatccatacccaaggcatttttaagatttccctaagctggaagcaccagaccacatgttatttaaaacatattaagatgtacctactgtattatgtatactttgtatatcattttataacagtctgcaaagtagcaggaaaaaatttttgccttcaggttaaactcagaagagttgccattggctaactgaaaaattttgcatttggtaagcatttaattaaaaatttattgatttcggttttgaggttttacttttcatatttttagagccaataacttctggaatctcagacatttttgtggaatcttaagttgttcatagatcctaggtgctgtgtttgtcatcctgagagcttaaatggccctgtccaaacctcagcctcagctcagagtaggaaattgtcaagcacttggtaactggtaagcaaatggattttagtcactaaatggagcgggaggaatggagtgctccctcaaaaagagcatttcagctggtcacagtggcttgggcttgtaatcctagcactttaggaggcccaggcatgaggaccacttgagcccaggagttcgagaccagcctgggtaacacaggaagatttcacctctacaaaaagtaaaactaaaaaattagccaggcattgtggtgccttgaatctgtagtcctagaaacttaggaggctgaagcagaggatcgcttgagcccagaaagttgaggctgcagtaagctgtgatcacgccacagcactccagcccaagcaacagagcatagactccatctccaaaaaaagaggctgtgacagaggaaggcagggggatgttaatcagagagacatagagactgggagagtctgaaagagaggcagagagacttacacaaattaaagacacagactgagagaaatggaaaaatgaagagaggatcccagacagattgattgacttcccaggtaacatataatatcttacaatcctgcagaatgtttaaagttgcattttaaaaggcactccgtttgttcacacaatcctggtaagaagatcatcttaattagtatcatactttgcagctttcaagcagttcttaggcatcattgcgtttaagacctggctccagccgttttattacagatgaggagattgacttgttcaccttacatttgtagagcattttgcaatttttttgaaggacatttccacccattatctaatcacaagtctccataaatcccatctcccctggtataaaagcagcttaaattacaggtgctactaagatgcaaaatgcagcccacaaaatcagcaaatattttttctttgtttcctccttttttaaaaaaggcgtagatttcatattactactttgtttcaggccgtatattgaagtaacaaaaataaaaccaaaattgacaccaattttatttcgaaataaaatctacttttttcactttcccacatcattttctagctgctaaccttcatgcatattcaatttttgcatatttacagccctgtcaaagataaaattttattttctgcattttcactcaacattatacactgagtattggccatttcactcatctcagtgccactttcaaagagatacccaggaaaagcagcagcaagggttgttcgaccttgaacaactacagataatactttggctctctttgagatttttaaggccctgtaagtaaaatattttcagattacagaaggcttgggattctgtctttatcacatgactgattggtcctccatgttctccttggcagatgtgggtatcagtgacacaatgttttttactcaaaacatggtttagcttaccagtaccaggaatggccgatgcatacgcattctcattgtgaaggtttatttgcacctccactcttcttaaccaggctattttcacagaagaaataaccccaacttcatgaaccctattcccatgacctatttgccaatctgttaaaataatggccaactcaaatgatcagtaatgattgactcaccatgacatcatccatcacctttgtcactggaagcccacttgccttaaagggtgcagcatcttccaactttgctccagcaacttcagctcctcattaaatccctccctgtaggtcatccctgcaaccagttgacactggagctcagcagccagctgataggggccttcactcctcttgtcgagctgctcctctctcctctcaaagccctctttccttctctcctgctggctgacctagaagctcagctaaagaggtgttcaaagggtccagtcgcttaaacaggtggccagtgtgctttctgctataactccttgctccttgagctcagctccaagctgtagaaggccatggaagagcacattgatgtcatcttgggaataattaacagggtccggtttttctgttcgtttccttgcaccagatgaagagtaggataaacttgggagaagccaaagtgatgtttttgtattgtggctttgaatgatttcaaggtcccttggttaacctattctcagcaaaagaaatagaagatggtcccaagatggtaagagcagagtgtttggttgataatttgatctaaaagtgaccagactccacaagttaacccccagagctgctcaattacagcagtttaaaaataagttgaggattcgttgctaaatcagtggaaagaatttggagtttccaaaatagtttgtaatcaagaaaagccatctgaggaggccctggagggaaaatcgctgatgattatcaaatgtccagttctcaatgcggtggtatatgtgactgaaaaaaaccacttttgtccacatttggggaaagataagattatactaaatgcctggcacatacactggaccttcagttacctagaaaactttcaaaataactttgccataacaagtggcaaattattaaggtcatgggctgtcttctcaaaattacttagataacatgattctctggccagtatgagacccttaatttatcacgtatgaagcatatgagcctgtttatccgttcgttaatcattatttttatctggcttgggctctgggttactggccatgcaggcagatcttcccttccaaaaggaaacgttattattctcttgtattcgtttctttaaaaacatgcagatttaacaaaacatattacttagcactcttactgatttagaaatatgatgacccttaggaaatgcatctccttaaaagaaattccaggcaaactcatttaacctttctggatgttagtttcctgaccttcaaaaaatgggatgttggaccaaattatcttgaagtttccttccagctgtgtgctcggtggggagtgctggcagtgtggggcaggacactgaatatctgtggtggtgatgtttggatacaggggtgagcaacccctttggaagcaacatgcaaaattgctgagcagtggtgggggtgcatgggaatgggtggcggtgcccctgtattggagtgtaagagacaagtgtggtgagagcagtctggcagggctactactgttatgatttacacagtccctttcatccagctacttcaaagcaccttcacaaactctggctcattattccttcaaacacagcattcaagaaagattgataggcgccttttaattaattcaaagatgatgaagctgagcattacagaatataaggggattcttccaaaagtatctgcactgcagaggggcatgatatataaagtgttcatcacaggtttctaactgaaacaaggaaatgacctgaacgcttatttttagaggagaccagtatatattatggcatattcagaatatgcaataccatgcacccattaaaatcatgtttattaagaatagtcacattagggaaatggtcataactgaacaacgtttagtggcataaaaaaagataaagctttgtacatacagtatgatgaaaatgtttaatgtggctgggcatagtgacttgtgcctgtaattccagcactgtgggaggccaaggcaggagtatcactgaaggccaggagttcaagaccagcctgggcaccatggtgagaccctgtctctacaaaaaatttaaaaattagccaggtggtcatgatgcatgcctactattctagctactagggaggctgaggctggaggatcactggagcccaggaggtcaaggctgcagtatgccatgatcataccactgtactccagcctgggcaacagagtgagatcctgtctcaaaaattgaaaaaaaaaaaaaaaaaaggtttaatgtgtagaagggaaaaggctaaatggaaatgtgttaaagtcttaacggtgatcttccttggagcaatgatatagtgggtggttgctattcttttctttatacttttatgtacttttatgttatgcaaggttgaaaaaatgggcacatattgctttcatagtcatttctgttaagataatcatatgattatgaaagagggagtgtgtgtgtgaaagtggaatggaccaatcaaatagaacagtaggaagacctcagaagatatgacacatgagctcaaccccaaagatgagaagaaccagccatttagtgaatggggaagccctctggggaacagaaggcacgaaggaaggaataagtttggaatgttctaggttttgaaaaaaggccagcatgggagaatgatgaaagataaggtcagagccattgccaagggcaaggtcatgtaggacccatgacgaaaagtttgggaaacccttgtaggggactgacataatttattttacatttttgaaaaatccttctgaccaatatatgaggaacattgtaagaggcaagtgtagaagtcaagatctattgagaaggcgttgcaggggtccaggtgagaatgaggatggttcagagtggagagacagggacaaggtaagttggagtgtgggtctgacttgttagccatgtggaggaaataattatcataataactatcatgtatgtttttagggggctctataacttcagtatgttttcagtgttcacatttgtaggtttacagagtttgtacttgataaggtacagaagtaagtcacttctcaaaaatcatgcctttagaagcatatatcatgcttctattatagtaatgataataatagaagtctactgctagtcataaaacttatctgttcagagaaggctttttttttttttcagagaagtcttccaggtttcagctgttgctcattaatgctcaccacagccctttgaggtcgatgcaattatgctttggaaaagctaagtaacttgccaaaggccatgcagctaaaagaagcaaaagctggattcaaatctcagctctctgcctccagagagaacaccctcaatcccgcttaacagacattagctctgcttatttgattggtggcagtggagatgaacagaagtgaacagtgagcagagaggggtctgtaccccacacacatccctgcaccccaactgtcaactgtcttccatcatcatttactatatccacgtccactcctgacagcatcagtggctcagtcttaccgacctgcatcagggttttgggctctgcctctgtttagacagagcacgatttgggaagtgctgctaagtcagccagtggctgagtagaaacagccctgcagtgggcctctgcctgctctgtggctcgtttatcatgtgtctcatctttaaaagttggggctcagtctaggtgcctcctggcctgagcaccccagaattctatgctgatcccttcattgtgacatggcctgtcatctactcttctgggaagaccatctgcacctcactgatacttgaagctcattgagtattgtcacatatcagcccagaaagtcacagggtacagcaactcatacttgctcccagcaccaggccagccccattctgcctccagggagtcacccaaaatagagagatgagggtaaaataagacctaggaatactatttatttgcctccatggcctttgaacttgcacatccaacgtaacggctcctgtgtgttcttgattgttccaattatcatttttcctctcgaatacctgagagcattcattattttgcaagagatttgagaatccctgtgccctaacttttctttccttgatgtgggatgttcttctgtgactaggtaagtttatctcaatgtgtccccaaataatttctcagaatgttaaattcataaaagctaccatgaaaggataaataaatgaaaggagttctgaggtcaaaacatttggggaaagaagagtctttctccttctgaggcattctcagtgcacagtaacctgtttatctcgctttgccttgctctttcccaagcacatttttgctcaacgccccctaccttccccatacacttgttaacactttgcagagcactagggctctgtgggacaggctgggaaatgcaggttgacatgccactgttaatacctagaaaattaaggcaaacttgtccctgagagatgtcaggatagcacagtatggaaaggccatgcttatcagggctcttatctgagagaatacagtggttatgagcatgactctggaactagacagtctgggttgaattccccgctctgccatttagttatatgatatggggtgtattacctaacatctctgtatctcatttgttcctcacttgtgacatggggatgatgacaatgataatagtaccaacctataggatagctatgagaattaaacaaattagtaaatatgaagtatttggaacattggcctgactcaggataagtcctgtttaaatgttagtatcattattattgtttcttcaagccaggaatatacttcatcaattatgtgtacactcattccttcattcaacaaacacttacttaatactcctgtgtcctaggcactgttctagtgctggagatacatcagtgaatcaaaaacatgagagaaaaatccctgtccttgtggaacttacactgtagtggaatctactactaataatgcaaatagaaagaaaaatatatgcaagttacccaggcactgggtagcctagtacctgtcctatagttgtcaaatggatggatatattattcttattgttgttgtcgtttacagtaattgagcttggaggtttgagctgccatcttagataagaacagaaagctaagccaatacgagtgccatgccagtaagaaaaggaaactattacataaagattaggaagaaaaaagagaagaatgacaagtaggccattatctatggccatgagttttatttaaaatgagctggaccttttttgccttctttatctgtgtatcagatagacaattacctctaggcagatttccacattccaagacatgaagactttctaagctgcagcagacacatctttacttgtagcaaaacagagagcgatgggggttattttcagatgactgtagctgaagaggaagaatcaagtaattcactccccccaataataattcacttctgagaggaaaaacttctttggaaaaagcaccccatgaatggaagtctcagcatttgctgaagaacttagttaaaataaactctagacctttttcattgattctttatctcttcttttccagaaaccttctctatgtctacccacagaggctgaactttgtaaacaaactagcatcagcccggaacattacaataaagatccagtttatgtgtggagaagatgctagcaatgcgatgccggtaaggagggaaacgaacatttgcctcaaatcagggtgggctgctcacccctgtcacttcacacaagtccgggactcatcagtgtacaaagtccgtctattccaggccaatactgctcagcatgtgcaagggcttctgtgcccaggatatcagtggggaaacagggtcagtcttacttgacgatctctttctcggcttattctgtagtgagcttggaacatacagatcattttagaggattaaaaaaagtcataaagtctttccatactgcccataggaccaccccactctaaaggcatacaaagtaaagagatggctcaacacgtgcgccatgtttgctgagtgtcttccatgcacaaactgtacacactgtgttatacacacacagtgttacacacttactcaagcctcggaccacagtgctgatgaatacaaagtaccgcctagtaattataaacacacaccacctccacaccttctaggagtggatctttgttctgaggcaaaatataaatcaaattattcatatatatatatatatataaaatgcagtgtgctccaaggaactcaaaatgccagaatttatactttttaaaccatctcctactaaatgagatggtggttagctattactatttcccataagtcatagaattcagttaatataactttctttctttttttcttttttttttttttttttgagacagagtttcactctttttgcccaggctggagtacaatggccgcaacctccacctcccaagttcaagtgattctcctgcctcagccttccaagtagctgggattacaggcgcgtgccaccacgcccagctaattttgtatttttagtagagatggggtttcaccatgttggccagggtggtctcaaactcctgacctcagctgatccacccgccttggcctcctaaagtgctgggactaaaggcgtgagccactgcacgcagttaatatacctttctaaaaagaaaaagaaaaaaatcctttctcttaatgtcccacccaaagaaaaaaagaaaaaaaaaaacctttctcctaacgtcccacctgtcttcccaatgcaaggtgtcttaagacagcggtggggtcctcttagtcctctctgctcaggcccctggcatgccactgccaggagtgccagatatgcttgtgcagatcctgtggcaaccaagatgcccagccaagagtgactgtgggctaaagtccagtctgttcttcattcactgagccatgggttctggtgttgggattactgcatctagaggaaagagctttttttctctgcacaaaggtgagtgcacttgttcataatgcatcctaaatgctgcttcaggcccaaggaggtatctttttctaaatggcacaaatgtggataaggcagtggagattcaaatcacctaagtgagtaggtctgtatgtttgagagagaagaacctggaactggggatttctcactcaagacaaaagtatgtaactttggcctgttggatagacctctaggcagtgaggcagagtggagagagtactggttttctaatctcacaaacatgtggcctttggtcactaatatagccccttggaacctcatttcacccttcatagccagttcctttgcactggtgtgcttgggccagttgtagtcccagcacttttttttttctttttgagacaggatctcactcttgcccaggctggggtgcaatggtgcaatctcgactcactgcaacctctgcttcctaggctcaagcgatcctcttgcctccgccccctgagtagcagggactatacgcatgtgccaccacgcctggctaatttttgtatttttttgtagagatgaggtttcgccatgttgcccaggctggtctccaactcctgggctcaagccattctcccacgccgacctcccagagtgctgagattacaggtgtgagccactgctcctggccaacccagcactcttaattgtacaaaatgcagctctatgagaccagaacatcctgttggcctgatgatagtcaatttgatgtacccaaatgttactgataatttgatcctttctctactggtgaacaggtcatctttggaaaatccagcgggcctgaatttctgcaggaagtgtacacagctgttacataccataataagtaagtctatttcagcattctaaatatatgccaagatggtttcatcatctcctggtttttccaagtcccgtgggtggttcctcctaactatttttataattcagggactgaggggcaaaggaaatccatgccagttccgtgactctgtgttgaagatgtataactttgccattaaccaagactgagagaagaacgtgtcttcaagaatccaatatagttttgacttttccagaagcttctattctagtatgatgcaaagaggttgtattacgttaattaaggaaacacatttcctaacttgctttgagaccctggaggggaccagaagcacagtccggctccccttgccctgtgtgtccctgtccgctccacttgacacctgccccactgtctgcctaggctgaccaaaggagaaatggaacactcattattccaccggcaaatggagtcatgggataatgcccaccctattattcatgttccacagggaagggagagacacctgcacagtgttggacggaattgggtttgatccgggcctgataacctgggcctaattaagtccttcatttaagcacattctgggattgggatgaggattaagtgaggtaatgtacattacatacctacattactttacaatgtacgtaatgtacttcgtaattaatgaagaacctagggcttcataatgcagttaaattggttcctttttcctcctgcctcattcatttgcttctactctttgatgagtgcagctaggtgctaggcttggttccttgggtagaaatggaaaaaggaggtcacagcaggagtccaaacctcatcctttcttcaaattaagttgttggagttttccattgtgtgggggagttgttttttgttttttgttttttgttttttgtttttcctgacaaagcctttagttcatgaacagttttatgtaagggaagtgcatctaataacataagcttggtctcagggacttccagcttcagagcagagtaatgtaaaatgaaaagcaaaacaccaggcaaattctgaggagcaaaggggctgtggcgttttacaatcagagaagtcatcattcttgctaaaagttatttgtgtataatgtgcttttgaaacaggtctcctgacttttatgaagaagtgaaaattaagctccccgctaagctcacagtaaatcaccacctcctgttcaccttctaccatatcagctgtcagcagaagcaaggagcctccgtggaaactctcctgggatattcagtgagttgtttccagcctgctgactcacactgcagttgttggtgcatctgaggtccctgcagagataaacaaccaaattctattcacttgattttttccagtcagaagtagcaaaacatgctaagccacattatagcaagaggcagaaatgatttgccttagcaaatgtcaaatttcaggaatggaaagctagcgggtgatagatgttggaagaatactcatctgttttttaaaaagcattgcagtgttcactatttccaaatttaatatccatgcttcacgtatagaactagctttgtcccccaagaagaaaccattttttctttaaaagatataaaaggtgaaataaacattgatgttgttcagacacacacaaacattggctacagagaaaaatgctactgctttagctccaaaagcaataaatcatcaatattaccatttcaggaggtctcggagatttaaaatgcaaagaactggacagaaattactgccaaaaagagtactggtcaatatctactcactgtttagttgcatttgattattgcgagctagataaattatcagaattatatgctgtaataaataccactttattatttacatcatctgtttcagtggctgccaattctcttaaatgaacgtcttcaaactggatcctactgtctcccagttgccttggaaaaattgccacccaactactccatgcattctgctgaggtaattggcaagctggccatcagctgtttcttgtccagctgtagtcttggaccaccttcccagactcactttccattcccatgtggccatggatgttcatcatgttctcagagagcacattgttctgataggatgggaggaataactgactgtgaaacctcattcttttaaatgccaccaaatcagaatgttcagtagacgcaacctacacccaaggcagcataaccttgcattatctaccacagagggattcccagaataatgtattatagaagaggaggcaaactaaggccattcatagtaaacaactgttcccatcaaggatccttataaaagattcccaggccagattcatccgtttctttcttgggtcagttgtcacagccctccggtagataccaaggtatttattctcctaccaatcccaatgccaatagcctttcccacttcctgtttctggcactttctcttgctcatccactctgctgcagtgcacccatttaaagagaagcccaggtggatcaactgaggtcaggatttcaagaccagcctggccaaggtggcaaaaccccatctctactaaaaatacaaaaattagctgggcctgctgttgggtgcctgtaatcccagcactttgggaggccgaggcaggcagatcacttgaggtgagaagttcaagaccagcctggccaacatggtgaaactccatctctactaaaaatacaaaaaaattagccgggcgtggtggcgggtgcctgtaatcccagctactcgggaggctgaggcaggagaatcgctttaacctgggaagtggaggttgcagtgagctgagatcacaccactgcactgcagcctgggtgacagagtgagactccatctcaaaataaataaataaaaaataaataaagggagcccaggggactgtccaccctgactgcaccagctgtcacactgctagcccacttctcagttccttgcataggtttacatcaataagtattattttgaagtaaatctcggacatcatatttcattttagtctgcatcttaaaagataagggatttgtttttaaccatcacaataccattgtcatactttaaaattttaactgtaatttcttagtatcatcaaatattcagtcactgatcaaatttttaattatcccactaatgctatatttttgacgcttgctttttaaaattggtattcagataaggtccacacactgatattgattgttacatctctggagacgcttttaatctacagatcctccatctcttttgctttccttgcaattttaagttgaagaatttctcagaaatttgaatttaatttcaaccgttccagtcaactttcttctctgttctttcgccatctaccgtctcacttccggctgttttcctcttattttcttttttccttaaagagagaaccaacttttgccctggaccacaggcatgtgtctggtaaaccaaaacttctctcatcaaagccatctaaggggcaatccgagtatgtccacagacatttccctgattggtctttatgatttggacatcaacacctttcagtatccctcaaaaccaccttcttatcatcaagttgcacactctaatttcttagaaccccctattatctttttaagctataggaaagacctgagtgttggagagagacaaatctgtgtccaaagtctagattctgccactccctagctgtgtgaatgttggtgagttgcttaccctctctgagtctcgaagatgaaactgagcccatatctgcatatctgcctataaggttgctgtaagcattaaatgagataatgcttgccaaacaacaaactcaattcctaagtaaacattaattcctttttcttacttgcgctatgctgtgtttatagatatacccttagcctctcttagtatcctttaaacctgcactgtctgataagatagccactagctgtatgtggctattgaggaaaatatggctagttcaaactgagatatgtgctataagtaaaatatgcaacagatttcaaaaacttcatggggaaaaatgtgaaatattgtattaataattttttacattgattacatattgaaacagtctttaggctgtattgagttaaatgaaatattactttcacatggtccttttgtgtttttttttttttttttttttttttagagacagggtcttgctctgtcactcaggctggagtgcagtggcgtgatcacagctcactgtaatcttgaactcataggctcaagcagtcgtctcacctcggcctccttagtagctgggactataggcatgcaccaccacgcccagctaattttttttttttttttcattagaaacagtgtcttgctatgctgctcaggctggtctcaaactcctggcctcatgtgatcctcccactttggactcccaaagtcctgggattataggtgtgagccaccatgcccggcccctttttacttttttaatgtggccactagatgattttaaattacatatatagctcacgttatatttccactggacagtgctattttagatcacagatggcaaactcaagtgcccacaggatccagatgagtaacataaatgaatgccttgttctggtggcatctgttcactctggagattgtctcttccccatctgaaggtcacagctgttctcttcactctgcagattggtgacatgctgggatataaggccaattttttcatttcttccagtactcaaatgaagttagaaaagcagtcttttataggaaattttcaggctttcaaatattggtaattaattttttaaagttcctaatacttcaaacagaacgtgtgtgtaggctagagcccactttgggccccagcttttgactgcttcagatagctttaaaggtctccatcccctgtacacatctacctttcattatgatgaaagacatacaaacctaggcgaggccctcactcaacactgcaggacatctctaaaggaatgcaatttcaatgggaatttaaggcaagaaactgtctgtaagacctacgaaggtaatgatatataaacgtataaaagagtcactttgagtaattaaagcaggagccgacctggcctagaaacatgtgggaaacacttggaaaaactgtggtgaaagggaaagtaatatcgggtactcaaaagtattaaaatttcatgtcttgtaaagatattctatactttgtcctgacaattctgattaatggggaaattgctgggatcttaatttattttaattcctagaatccagaatcatcaatgctggtttggaacttagagacagattacaccgttcagccctcttctcacagcatgagaacagaacactaaggcccagaaagtttagttgagtcgtctaagtaaaaataactagtttgaagcggggcacagtggctcacacctgtaatcccaacattttgggaggctgaagtgggcagatcacttgagcccagaagtttgagaccagcttgggcaacatggtgaaaccacatttctacaaaaaatagaaaaattagttgggtgtggtggtgtgtgcctgtagtccccgctactccagagactgagacgggaggatcatttgagcccaggaggtcgaggctgcagtgaaccgtgattgcaccactgcacttcagcctggcgacagagtgggaccctgtctcaaaaggaatgaataaatacataaatattaactagtttggtgtagaattgaagttgaatccagggctcctgactccaagaacagttagattagttttcaagagagttctgtatttgtataaccctgacatttccagtcaagttggtctgcattgcttgttagtaatcagaaaagggaattggattgctaatcttttttttttctctttaacacagaaagtcccattacagaatcctcccattaagtgggctgaaggacataagggagtatttaatattgaagtgcaagctgtttcttctgtacacacccaggtaaggaatgtcaaggttaatcatgaaggtaaaggtgcagcggaggagcctttgaaggacaggccaataaaagatcagtgaaaatccttgtctacagataaataaaaaataaccctttagttctttgtggggacatgcaaacctctttaggtttcatttgtcattggaatagaaagaccttacaaaaccgccgagcacctaaaggaaagaacctagtatctgcactgttggtggagaaactttgcagggggacttgatttgaaactctcatctgctgttacttcttttccctctgtaactctgccactttgccagcttttaaaaagaaattccgtactctctcctttacctgccactgtctgagttctgcatctgctgagacctctctcttggcagtatgcttacctggtacgctgacctctgcttacagaacatgtcagagccaaaattatttcttctttagctaataattattgaaacgttcaacttcatgcaccacattctacaaagaagttcatagcctcggtctgaaacatcatgtcttagaccttctggtctgaaacgctggataagaggttctacccataaagagctattcgattgtgtttgtgaatccactggtgaacattgatggtataaaaccccatgaggcctgccttctcccttcgcaggacaaccacctggagaagttcttcaccctctgccactccctggagagccaggtgaccttccccatccgcgtgctggatcagaaaatcagcgagatggcgctggagcatgagctgaagctcagcatcatctgcctgaactcctcccgcctggagccgctcgtgctcttcctgcacctggtgctggacaagctcttccagctgtccgtgcagcccatggtcatcgctggccagacaggtatgaacctgcagggctgggctgggaggaggcaggagcaagcaagcattgccttctttaatgaaaaatgactttccagaaatccagagacaatgtgatcttcctttccactgatgatgtgtgctcaagggaggccaagtcttatgctattttttttttgagactctctgcatgttggaaagaaaaagaaacattaaaatagggttcttaatattatagctttttgtaaactttattaaatgattataggcagtctttaaaattccatttctggtaattgatgaatttattttaccttgaagatatttttgttttcttgactaacaggaaatggaacattttaaggtaagacaacctgtgttaaatggagggaaggaactctctacattgaaatgcaatgcaatcaatttttaaagttaaaacataaactcactattttaaagtgtatagttcattggtttttagtatagtcacaaggttgtgcaatgatcgctacaatctagttttataacattttcatcacctccaaataaaaccccatcactccctattcatccctccccctagaactcatccgttctctcttacagtctattttaaatgcttacttttaacaagttaacactaaatacaatgtgtacattttcccttagaaataatctcaaaagcttatcctggaggcatgaccagagtccagtggttctcctaactcttccagggtagactggctggtatagggcatctttatttgccaccattttcagctgtgcctatatagctctttgctttccagtccagcagacgtcttttgggtaccatccatatgcccagtactgtactaaaagttgtaggctttgtgacaataaccaagagcatctcagacctcagaggacttataatatggcaaagagtcagcagcacaggacaagactcctcaaagggacacagctaaattttgcagtggttgtggggagggtggtatcaaaggagagagtgagaaaacatccatctgggaggatgcaggaggtccacataaagagatggccttgaagaagggatagagtgaaaaccgacagaataggggcaatgagatgagtgcagcactgcagagaaccagaaaagtgtgggagtgtcaggaagaaagtcagtagcacagttggtggtggaacagaagcacgtgtggaagtgggctgggacaatgaagtgagacggcttttagagccagggaggggcatgtccccttaatctctcactctgctttgcaccctgatatgcatcttctgtggttccacagatcaaacgtcctgtgttggaggctaacttttcatccatgtagcagttgcctctccagctagattcttgcagagctctgccctccttcgattactttctgtgcccccgcatatgtggcacactgctttgtatgttccagctagttaatacagacttgttcaccagacaaaaatatttatatgttttgagcagcttctccatagcaagttgccaccttgtggtgtgaggaccacagggtgttggcataggcagaataagtggaggtggctagtctacaagcatttattcagaacctattctgtgtctctgcaatggaaagcacagtgggggcacaaaagatgtgagaaatgcacttcgcatgggaaggattccagctttcacagacagacagtttaccaccagacatggctggagaatcatgtaactcagtttcacttgagccctgtactgtgtggagtcagacggcttcatggaggaggtgggacttgtgctgagattcacagggtcggtatgattttgtggatgggagtgaggagggcttcctaggcgaggacaacagcatgagcaaagtctcagaggtaagagagcaggcatgatgggacaatacaatgactgcctcattttaagggatgtcgaactgagccaaaaagggtacaaggttagataagtatattggagccaaactatagaggcttagggcaccagaacaagaggttctatgcagtaaatcaaatgtgtatgggcccactgtgggaatgacttgatatgcagacatttttaggttaatctgtacaagaatcagggttgtgcagcacatctcaaatcatagtgtccacaacagtcacgtgagcatcttgtaaagatgcagaacctgattaatacactctctggggtggggcctgagattctgcatttcttagtagcaagcaggtgatagtggtcgtgtgtgtccgcagcccccactgagtagcatcagtttacaacctggcttagagaaggaggacgtctggacagtcttatgtctttgtcattaaaaaccatcaatgctattcagtggcaggaggaggaagttcaaaagagggaatgtggaggcatctgtggtactcagagccagcatgccagagctcaccaaaaccatctacccttcccaggcctagttaaattggtcagcggtcaggactcattgtcactgtcctggagaaacttccacctcaggctccttaaggaccagctgtgggactacccatttttctcttggttcctcagccaacttctcccagtttgccttcgagtccgtggtggccatcgccaacagtctgcacaacagcaaggacctgagcaaggaccagcatgggaggaactgcctgctggcttcctacgtgcactacgtcttccgcctgccagaggtgcaaagggatgtgcccaagtcaggtagagttgccctgagtgtgggactctggtgggcggggcaacaccacctccaccccactgcagtgtaatccaaaataaaacatcctatgctgggtgcaggggctcacatctgcaaccccagcactctaggaggctgagatggcaggatcgcttggagcagtggctcacatctgcaaccccagcactctaggaggctgagatggcaggatcgcttggagcagtggctcacatctgcaaccccagcactctaggaggctgagatggcaggatcgcttggagcagtggctcacatctgcaaccccagcactctaggaggctgagatggcaggatcgcttggagcagtggctcacatctgcaaccccagcactctaggaggctgagatggcaggatcgcttggagcagtggctcacatctgcaaccccagcactctaggaggctgagatggcaggatcgcttggagcagtggctcacatctgcaaccccagcactctaggaggctgagatggcaggatcgcttggagcagtggctcacatctgcaaccccagcactctaggaggctgagatggcaggatcacttggagcagtggctcacatctgcaaccccagcactctaggaggctgagatggcaggatcgcttggagcagtggctcacatctgcaaccccagcactctaggaggctgagatggcaggatcgcttggagcagtggctcacatctgcaaccccagcactctaggaggctgagatggcaggatcgcttggagcagtggctcacatctgcaaccccagcactctaggaggctgagatggcaggatcgcttggagcagtggctcacatctgcaaccccagcactctaggaggctgagatggcaggatcgcttggagcagtggctcacatctgcaaccccagcactctaggaggctgagatggcaggatcgcttggagccagaagttggagaccagcccagggaacataatgagactctgtctctacaaaaaatataaaaattagcagagcatggtggcacatacctttagtcccagctactcaggaagaagctgaggcaggaggatcatttaagcccaggagttggaggctgcagtgagctatgattgcaccactgcactccagcctgggaaacagagcgagatcccatctcttaaaacaaacaaacaaacaaacaaacaccctaaaattccattttcgttttcaggacaatacaaaacttacatgaatgctgaaattatgtgtttctttatagatctttcttcctccctccttgcctctttttatgctctaaacacttattttgtctgcccatttgataatccctcactggtctttacccacttgctaatttatgattcagctgagaatctcttttttaagatggagaagtggtgactgatgcctacgattctagtataataaaggaaataatatatatccaatggcagtggttcttaaactttttgttattaaaaaaaatcccttttcacatttccctcaaactgaactattgaaataatagtaatgcatttccccaactcttcttaattatttacataagtaataatcaagtagaacttcttgtcagcatgatataaaaattagtgtcagtgagttcacaaaattgcaggcccaaataaacatgacacttttgttggtctgtgcagcctcatttctagtaaatctgaaaatttgattgagtttttaaaaatactagtgatgtggctgggtgcggtggttcatgcctgtaatcaatcctagcactttgggaggccaaggtgagcagatcacttgagctcaggagttcaagaccagcctaggcaacgtgacaaaagcccatttctataaaaattacaaaaattagccagtcgtggtggcgggtgcctgtagtcccagctactcgggaagctgaggcaagaggattgcttgaacctgggaggcggaggttgcagtgagctgagatcatgccactgcactccagcctggaggacaaagtgagaccctgtcttaaaaaaaaaaaaaattaaatagtaatatctcatagatttccataaccgcttgtgaaaacatgtcaacatttaaagatgaaaaacagtgctgtatacatcatataccgtaatcctcacaaggttcagatgactctatggatttttgaatctgagaaaacctcactgcatgaattgtaaagttgtcatttaaatattgacaaattaaaaatatccacatttttagcttctcatgagaaatcagaagctctagcaaccctggggtccatttcccgatggcagtaatagactggagccagtagtaccccctgcctttgtaagaggcatgtgttggctgtttaccatgatctccaccactccctggtgccttatgccccatctacttctctccaaaagattgcctcctaccccaaccaggatttgttaagaagtctctaattccaaggcctaatccggtggcttttcatccaccctatccctcttcaattccttcttaaactcagtaagtaactctgttcccctgtctgttgacatgtctctgcctggtggggtgcaggcgctcccactgccctcctagaccctcggagctaccacacgtatggccgcacatcagctgctgctgtgagttcaaagctgctgcaggcccgggtgatgagcagcagtaacccagacctcgcggggacacactccgcagcagacgaggaagtgaagaacatcatgtcttcaaaggtaggaaagatgtcaaaccgtggaaggggacacaggcttttttattttttaactaaaacttggagaagtaacacagaagcaaccactactgctgcccaccatgctggtcggatgctttaatgctcagctttggagtgattaacgttctttagaacagattaagaccattctgacagatgcagcagcaagaccagcatctgaggatttgctgagaactacttagcttgggtagcaaagttttaaagcatcaggggtttagccacatggagtcatgtggctaaaccatgcattttattttcaaggaaaaaaaatagctttaacttttgatacctggaaaggttgcctttaatttagttttgtttctttaatacctacctcttacgttcattaacatccacagattgattatctcacaaaaaagtccaaaggaacagccgggcatggtggctcatgcctgtaatcctagcactttgggaggccgaggcgggcggattacttgaggccaagagttcaagaccagcctggccaacatggtgaaaccctgtctctactaaaaataaaaacattggccaagcacggtggctcacacctgtaatctcagcactttgggaggccgaggtgggtggatcacaaggtcaggagttcgagaccagcctggctgacatggtgaaaccccgtctctactaaaaatacaaaattagccaggcgtggtggcacatgcctgtaatcccagctattcaggaagctgaggcaggagaatcgcttcaacccaggaggcagaggttgcagtgagccaagattgtgccatttcactctagcctgggcaacaagagcaaaactctgtctcaaaaaaagatacaaaacattagttgggcatggtggcgggtccctgtaattctagctactcaggaggctgaggcaggagaatcacgtgaacacgggaggtggaggttgcagtgagccgagattgcaccactgcactccagcttgagctacaagagtgagactccgtctcaaaaaaaaaaaaaaaaaaaaaaaaatcccaaggagcaatgccaaattttacaagcatataaaaactgacatcctgagagggttgatggcttgccctatgttgtttttccctctatgaattctttatttttttcatggtaaagctttactttcagaacagttttagagttacggaattatatactctatacccagtctctcctttattaacattttacattcaaatggtacttttggcacaattagtgaaccaatattcatggaatattattcattaagttcatctttattcacaccttctcagtttttctctaatgtcctttttctgtcccaggatcccattctgaatgccatattacattttgcagtcttgcctccataggctcctcttgctggaaacaatttcttagactttctttgttcttcatgaccttgacagttttgaggagtaatggtcaagtattttgtagattgtctctcattaggaattttttaaagattatgatattattcacataccataaaattcacccttttttaaaagatggagtatacgatccaacagtctttaatctactcacaaagctaccacgatgaattcttagcctgaattttttctccaatgatctgtggcctcagggtggccgagctattagagtaatatcatttcccctgataaagagaaatcaaaatctctaggtttagacacagacacagtttcacccttacaaattccagccacttgacactgtgtggtgtgaggaaggaaatctgcaggccagggtttggggctgggcgccaatactgccccgctgtgtggccatgggaaagtcatgtaactgtgctgggcctcatgtcctcatctctgcagaggtcctggtccctgaatgaacttaagaaccatctaccctgggtcttttaaaaacactggatttggccgggcaccgtggctcatgccagtaatcccagcactttcggaggctgaggcgggcagatcacgaggtcaggagatcgagaccatcctggctaacacggtgaaaccccgtctctactaaaaatacaaaaaattagccgggcgtggtggcgggcgcctgtaatcccagctactcaggaggctgaggcaggagaatggcgtgaacccgggaggcggagcttgcagtaagccaagatcgtgccaccgcactccagcctgggcagcagagcgagactacgtctaaaaaaataaaaataaataaaaaataaatgaaaaaaccactggattcaccccctgagatgctgatgatctgtagtttgagccatcaggaattattcgtattctatcctttttgacttacaaaaatcagttcagggatgtgctggagtgagctcatacctgttcccaaaagctgattgcttagttttccagaattttttgagccagttttgaaacagacattgttaaaattaaatcgtataaacttaaaattaaataagttatattaaaaacaaaggtaatctgaatgcaatgtggtatgctagattgtatcctggaacagaaataggacatgagtgcaaaaactggtgaaatccgagtcgttcgtgtttagttaatagtaacatatcaatgttagtttcttagttttgacaaatgtaccttactataaaagatattaagagaaatgcaatgaaagtcatataagaaatactacctttgtaacttctctgtaaatctaataataactatacaacttatacttcaaaattaaaagttcactttaaaaaggtaaacctagtcccttcctaataatttcactatatgctacaatatctaagttcttccttctttacgtttactgtgtctgtgtgatggaaatattatataatggtttgctaccacactgcatttctatgacatcgtgttggtagattgaaatcagttatgatgaaagtatttgtggcacaaaaattggcaaatgctacaaattacccctacccccctgacaactggttgttaaacatttgccagcacaacacaactcagcctcatattgaaagcccctttcagtaataccactttctgatcacccaggaaagaagtggtctgcagctattactgacagccttgatctttctatttttctttaataaaatgaaaatattaaatttttatgtggacagggttagcaattttcgaattattttgttgcatggggagaaaatgtctgatagagcatgagcactccacttcccttcagaggtagtttttgacaatgtattggtgtttaggagacagcgtggtgcagtaccgtactaaaccacagagagacactgttcccacacattttttcctggcgtcccctgaagtcacagactcctagaagggactactcagcagcccagattcttaaatagtttttaactgtaggttgctacacacaaactattaacgggtgttgtctcaagagcaagtaaaattaggtataacttcactgtctttgctttgttttatatttacttatggcaattgttttacctttgtaaccaggaaaaaaaatatgtataaaaaaatgaattctgaggttgtgatttccagatgtctggcttacctttccatggttggttgactgttaagccatggtttgtgtattttagatcgccgatcgcaactgcagccgaatgtcttactattgctctggcagtagtgatgctccaagttcacctgcagccccaaggccagccagcaaaaaggtactgaagagagcaatgtgaggttcatcccaggataagaacagaaggatttcctcatgccctcacactgtgcttgggaatagtcaaagtgctcccctgcctgtccctgatgtgctaacacacacacaccccacacacacttttgcagccctgtcctttacgccacatttgaccacctaattgcccattaactcagtgtttctcccactttctcatgcatcagaattacctggaagccttgttaaaactcatcgctggaccctacctcctgagtttctgattcaatagatctgagctggaggctcaagaatttgcatttctaacaagttcccagctgatgctggtccagggaccacattttgagaaccactgcattggcctccttttagtagagggaaagctgggcacaagtcatccttgacaaaagtgaatggcaataattaggtatcatttgtttcaataccatataaactaatatgaaatgcttcctcataattcttcacaatcagccttacctatgagttcagaaactttaaaagctgttaaactgcttaccaggatttttaaagcaacaaaattccccaatcatagtcccagcctatgtggtctgagggatggagggaaaaaaaactgtctgccctaatttcctctcttctaggcactcaagaatctcaccattatagtagctacttaagtttttaatgtctttgaagacctgtattaaaatgtaaatatggcagggcacagtggttcatacctgtattcccagcactttcggaggccgaggtgggtggatcacctgaggtcaggagttcaagataagcctggccaacatggtgaaaccccctcctactaaagatacaaaaactagccgggcatgatggcaggcacctgtaatctcagctactcaggaggctgaggcaggagaatcacttgaacacgggaggcagaggctgcagtgagctgagatcgtgccactgcactccagcctgggcgacagaatgagactccatttcaaaaaaaaaaaaaaagaaaaaaagggtaaatatgcttattgcaaaggataacacaggaagccatttgcaagagctgacatcacagggaaatgtttattaaacaggcaaggagggaatgagcctccccaagtctccctttggactggatgagggaaagaccaagtgtgggagggccggggcctggtgctgtgcactttgcagtattccaggcaccatatgtctagtgagaggtaccaggatttaactataaaaggaaaagtgaaaaaagatatggttaggctaaaaacaaattagtccacttgctctaaaatttaatattaggctatcacaggccctatgcagtgactggttataggtattataccattttcctttcttaaaaaccattatttgcctacagcctgacttctttaacccatgtcctgtttggtttcgcagttgccatgttttgacttgaaatgaccagaatagagacattttatttcaaagggaagtttggccaatatgtttccttaataccttagcagacagagttttgctgcttggctattttatataacctccagagcaaggtgttcttgtaataatgctgcccagaaagcagcatgaattactttaagaagcagcttatccttgtctaatctcttcttgccataagaccctggcagacaaactgacctattttctagaggcgacctttgaagctgggggagcatgtctttcctacaatgagaagatcaaggtgtagtccagttataatatgtgcacagttagaccacctgctagactaaaactcaaccccacgcctctctcaagtgagacagcttcacttcagactcacaacagcaaacaaatgtgttaacgcatattaaaattattaaggtttgactaacctcacaaaacgaagtgaaaccagtcgataagctgaaacacctaagcattctccattcctcaccactaacccgcctgggatctaattggttaaaatacccaagcatgtatacagagattttccttttgtcatcttttagtttagctaagtagctctcaaattttaatgtacgcaagaattagtacattgggttgcatgcgtactggactctgtgggtaatttttttttttttttgaaacagagtctcacttactctgtcacccaggctggagtgccgtggtgcaatcttggctcactgcaacctctgcctcccaggtttaagtgattctcctgcctcagcctccagagtagctgggattacaaccgtgaaccaccacatctggctaatttttgtatttttagtatagatggggtttcaccatgttgaccaggctcgtctcaaactcctgacctcaagtaatctgcctcctcggcctcccaaagtgctaggattacaggcatgagtcaacacacctagccctctgtggataatttaaacgactgtcaagagcaatgtttgctgtaatcagtttttgctttaggtgttgactttaaaacttaatttgcaaataaggatatgatattagggtgttcaaatagctttagctttcttacctactttcttaccagaaaaaaaaaatgagtttatctacgtttattccaggttttgtgggcataagatgaaagaaaaccacagaaaattcccagacatcatttttggcattaattagggtgaccaactgttctcatttgcccaggactgagggagtccccaagatgtaaggttttctattttaggaccaggacattatcaggcacactgtaatggattgattgccctacctttagtcttgaacttcttcctcatcaaaatgattgtcaggaatatgaacacatagccagatatgctgtagaatggaaaaggtataagtcaccctgtgcactatttgctactgagcagtaggtgacttgaagggaagtgaagacgcaaagtggagctgggggactttccaagcatctggccctgggacatagacatttagatgttgtaagttaaggctgatactactatgcctttcagagcccaagatcctctcataaaccccaccgatcctgcttcccacaatgccatatgggcattataaaaacaaaaattgtccagtctcctagagagtttagacaccatctagacagtggtccctaaagtgtaaccctggaccagcagcagcagcagcagcagcagcagcacccaggaacttgttagaaatgcaaattcccaggctattgaatcagaatatctgggggtggggccccccagtctgtgtttcatcaggccctgcaggagattctgatacacagaggccgggcgtagtggctcacacccgtaatcccagcactttgggaggccaaggcgggtggattgcttgagctcaggagtttgagactaagtgggcagcatggcgaaaccccatctctaccaaaaaaaaagaaaaaagaaaaaactagctgggcttggtggtgcacgcctttagtcccagctacttgggactaaagtaggtgggaggattgcttgagccagggaagttgcagtgagcgagattacgccaccgcattccagcctgggcgacagagtgcagccctatctcaaaaaaaaaaaaagtttgagaactgctgccaccaaccaactgattttatggatgagaaaactgagggtgaagagaggaatggcttgcacatggtcacacagagagttttcagcaggacccaagaggaaagtaagacagtaccagttttaatggctacccagaatgtttcccccgtagaatagagtttcactcccaggctgagtccactccctcagatgtgtctgtcctgtgcagcactgaccccagccttctatgcaccgaaatgtcctccagtctcaggtgatctcagcactgactttgccatccaccacttactgcctagaacatctaagacacatgcttcaggaacgaacaagctattaaattggggggaataaaagaaaagaaaaaaagtgttggtgaataataatagcctttgtttcacagcctaatttttgtggttcttatttagcatttccatgaggagcttgcccttcagatggtggtcagcaccggaatggtgagagaaacagtcttcaagtatgcctggttcttctttgagcttctggtgagattcttgcgcgtttgtatctgtgctcaataggccaagagaagcacacagcagaaaggaattgacattttgttcactgagttgcccctgctgaaaacctggggtggtttcttgaaatctaataatctctcacccctcccatccttcttccactaaattgtgttgcttctaccatgaaaatctatcgccgtcctgtgagttctcatcaccttcaccactctccacctggccacacaccatcatctctcatgtgcctctcgcagtgacatcctctttttcctgcctgtatccatttttgctcttggcccacccattctgcacatggcagccaatactaaacagagaatgtcacgctccttttaaaaaccgatcgatgattttcactgcactgagaagaaagcacaaatttttatcatgacctaaaaagcccttgtatgattctgttgttttcctccctctctaacctcatctcacgccacattcccccatcattcagccacatggtcctcttttggtgctttgaagatgccaaggccattttggcctcacagccttttccagattctcttcctgctccctaactttcacctccgcacccccaacacacacagtttctattcttctctgtagatttcagcttcagtggaaccatccccaagaggccttttctgaccacctaatactgtaatatatcttcctctattatcctccttctgagcaccctatttatttctttcctagtggttatcacaatttctaattgttttttctgtctcagcggttagattttcaggatttgggtctctcttgtgtattatcccatctctagcctcagcacactgcttggtaccatgcaaggcccaattaatatctgttggaaaacagaatgaaatttgtatatctgtttatcctaaaacttctaccattactcgagcagaaaagcaaaaggtatagccataataccttaattttaaaataaggggaataatagtgataactatttttttgtttaattattaatggaagcaaaaggattttcccatagaggcactaaaaataaacattttctcaatgttgataaacagagatgcataatgagatgatgttgaatgaaagaggtctaaagacatagacaccaactatataaaaatatatatgcaaacagttcagaggatttggagtaggttgagatttagtgataatgttagctttatattcattgggttctttcccctgtcccattaagtgaatctttttttttttttttttttttttaaagagagtctaggctgggtgtggtggctcacacttgtaatcctagcactttgggaggctgaggcaggcaggtcacttgaagtcaagagttcgagaccagcctggccaacgtgacaaaacccatccctactaaaaatacaaaaattagccgggtgtggtggcgggtgcctgtaatcccatctactcaggaggctgaggcaggagaattgcttgaacctgggaggcagaggcagcagtgagctgagattgcgccattgcactgcagcctgggcaaaaagagcaaaactccatctaaaaaaaaaaaaaaaagagagagggactaaagagatgggaggggttccacctaagctctagtttttgtatgtaagttgaagcccaagaaaaagggagaaatgctgaacaataggacacagagaacaaagggcaaaggaaacaaatgaaccatccactggggaggaaataggaagcaatgtggaatagagttcagaagaagtcaggttcatgccacagaaacacacccaggattcaaatcccatgaagttttgcaaagtcccaacctctgttttgagaagggtcccaaagcatggtcccaaatccttgccacagaaccacctggaggtgcttagtaaaaataaagcagagattctttctcaaagcactaaaattaggaggctggaggccagcattgtgcatttacctgtcttctcaggtgacttctaagcctgttaatgatccactggtctacaccacctctgttctgtgaatcctatacagagctacaggtcttttggaatttgtactcagacaacaccagaatttttttttcattccaaaagccgagctaattaaggtggtggctgcagctcacaagtcttggggcaagagcattaacaatgagacatgagctccatgctctggcaggaaagggactgggccataagacccattcccctcttgtttcttgaggcatgagaagtatcaaaaccgtcaccccatgccctttatatcctgcttctatttacacatcccacccaccatcatgtctctccataaagaagattcactcagcctagctctgcaaaaatgaaaaaattacctgggtgtggtaacatgtgcttgtagtctcagttactcagcaggctgaggcaggagcgtcactggagcctaggagttcaaggctgcagtgagccttgatcatgccattgcactccagcctgggcaacagattgagaccctgtctcaaaaaaaaaaaaaaaaaaaaaaaaaaaaagaagaagaagaagaagattcacttgagtcataatccagctatggataattcatacaaataattcattcccaatgcggaattcagcattgcttattctgagtggttccatgtggcatcttagagctctctttccaaaggaagtttgcattctctgcaggtgtaatgatgtctctgttcttcacagaatcccaataatagttggcataccaatagttggcataccaatgggagaaagaataatcacatcaaaactactgagcatcttactatatatgtgccaggcagtgttttaagcattttaaagcatcatctaatgtaatcattatgcaatcttgaggcaggaggaacttttattatcccaaatttacagatggggttggaggaagggtggtggccataaagagagtctccaagtcagccaaatgcttcagcagtaccacttcactgcccctaactgcttttggccttgcacatttatttactagggcttcgttggcccaggagagaaagcataagctaaagcacatggcccatcttacctctaggaagtcccttatggtaaacagatgaagttttttgggaagaaagcccctgctgatctaagcatattgcaggggtttgtcaacatgcagatcacccaagacaccagttctaccagcagcctaaaacctaagtctgtcaggttctggcaggacagagtttccgttgcccaaaagggttaactgaaaagcattgatcaaaaggactctgctcagcatgtatgggaggttcaggggccaatgaggattggtgagagcccccagggtacagcagctggcagaagcctttctctatgctagctctaaagaatcaagagtatagcagagtaactggggcctagaaaaatctggaggcagatgagacaatcttagaaaaggagcctggggccttagaaaaatgttgccactaccaggacctcactgcagcagggatgagggcagtggaagtgagtaactacctgggcctctctgttctcccacgtaatgatccccttgtttgtgctcctgttggccaactccaactggaagccaaaggttaagggggcctgagtgatgtggtccctcgagacccccttcccagcattcagagacagacagagaaggacaagaaatccatcagggagctggggtaggggcaaatggaaactatcatcccccagccagaactttgcaaggaaattgatctcagactcagacaaggtgcccaattcttcatacattgtttatgcatttgcctgaccaatgcccaggaagttatttgaaaaccaaaacagttttgttttgtttttttccaagaagcttgagaaagacaacagcttccttggccttagccaacaacctgggcaatttaacaccctctagttgtgtcagtgcccaagcgctaatgaacaaccactttggcattagagctgttaaacacaatgcttgggcgactttcacacttgctaatgaataaaatccctgtgcttctagaaactgctgagccagaccttggagaaatagagataaatgggtgacctagtttactcactcaggacatgaagttccacattaaggggttctttagaggtacccttactttaaatgggccacaaaggcccatatagggggaaagatttctgtgcctcgccccactcaacagggccaggcctccactagtgtttctactggatgttcttctctggagatctggaggacacagtagctggcaagctgctgacagtctggaaagaggccattggttggaagtatggtattgtgagaattatgtatttggttgtaggatggccaaactcagcagacaggagccaaatacagcagtgagttctgaaagccttagtgctgggatggttagcctgcccagaatcaggattggcattgcccaaaacaaagaggccttatcttcttaagtcctttgttaggagcatagtgagagagaggcttttttcggacaaaaatgggtccagttcccacccttcattcgggtcttctcaccaggtgcatgcggccttgtgggatatgaagccatctctgtgtcccaaaccaaagaggatgccgccatgaggagaaaccatggtttctctactgagctttagggtttgatgtccttaggtcttccctgagctggccatggcgttgtctgaaaacatgaaacacataaagcctgtgtctctggttttttcttattttgccttccctttgttttttctgtttgtttccatgctaacaaaaattgccagtgctgcatgcatccttagaaactgaattctgctgttagtgtattaacgttctctcatgtagctcctgggagtggaagtcccctcttcttccagtctcaacacagagggcaaatgtgggtggttcaacttccagtgccattagtagtagtagtagtagtagtagtagtagtagtattgcagtggctgtctgactaatctagacgcatacatgaaaacgttttcagagtgtagggacccaaccacaagaccttctagtcttccccatgttcctaatagtgtaagcaacttccaacaaggataagactcaccctcagatggtgacaagggggcccatattgacctgtgaatctcctggccccaagaagatgtccaaaaaataagcatgatcttgatttaaaattgtggtaggcattgagatagtattattctagtcataatgcagacagtcaccaattgacacaaggatatctatatatagatacgatatgtatatgtatgtatatccatatagatatatctgtatataaatatctttctgtcagttgacgaattgtttgcattatatatgtaaccacagtatacaccagtttgtgtcaattggtgacttgtattgacacaaagatatctatatagagatactagatatagatagataatctgtatatagatatttttgtgtcatttggtgactgtctgcattatgtaactaaaaattagacttatggaactcaaaatttcccctagaggtaatgttttccctggaggcaatgttctaaatagtggttctgtttccagctggccaacatttcctgctcaatatataatatagctaaaatttataggagcagaagataactgctggaaactatagaactgtttctggaaaaactgtgctccctcgagaaacactgaaactcaagataggaggaacatttctcccacgttctccttactgtagtttcaggaacagaaaagactttagttcgcatcaagaaccttgtgataaactgttcctttctgagtcatgtgttctgtcctatgatagaggacacctagctggttacaggagcccagctcaggtctgccttccaggatgtaggcagttgagaacactgtagctaaagaattaagctcctggctttgtcagcagcaagaagggagcctctgacttggggtcaaaaagaggacacccttcccacctcccgccaccatggtaaccattggtgtgtctgcagcattttagtccagagcttgctcgggcaccaccagcacagataaagtgtcagaaaatccattgttagagagcatttctgtgagtctttcccccttttctgcattgtacaagcaggtcaccaatctccatgttgacatttcctccatccccctccgcaggtgaaaagcatggcccagcacgtacataacatggacaaacgggacagttttcggaggactcgtttttctgaccgtttcatggatgacataactactattgttaatgtggtcacctcggaaattgcagcccttttagtaaaaccacagaaggtaactgtattttactctttattttctaaattgtttacctggaacatatattactttcataatcagagaaaaataagcatcattttaaaacaataattaaaatataactgtaatgacagttaaacgcagtatgttatactggactggaccctgatgtggggctggaaaattgttataaacaaattacacacatgaggccaggggttcgagacctgcctggccaacatggtgacatggtgagaccctgtctctactaaaaatataaaaattagctgagcatggttgtgcatatctgtaatcccagcaactgggaggcagaagcaagagaactgcttgaacctgggagacagaggttgcagtgagccgagatggtgccacagcactccagcctgggtgacagagtgagactctgtctcaaaaaaaaaaaaaaaaagaaattgcaatatggactgtggtttaaatgatcatatcaggctgggtgcagtggctcacacctgtaatcccagcactttgggaggcaagggtggtcagatcacttgaggtcaggcattcgagaccagcctggccaacatgttgaaaccccgtctctactaaaaatatggaaaattagccgggtgtagtggcacgtacctgtaatcccagcttctcgggaggctgaggtggaagaatcgcttgagcccaggaggcggaggttgcagtgagccgagatggtaccacagcactccagcctgggtgacagagtgagactccatctaaaagaaaaatgtagatatgaaagataatatttttgctcttaggaaatacaccttgaagtgttatggggtaaatgggcatgatatttgcaacccattctcaaatggttcagaaaaaaatgtttttatgttcatagaatgataaaacaaatgtagcaaaatgtcaagtattgataagcttcgttaaagggtatacagtagttctttgtactattcttgcaccttttctgtaagtttaaaattgtttcagaataaaagctaaaacatatataaaatggaataaatcaaatgtttaaaaggcagctacaaaaatcttaggaagcaatgtttattattaatcgctttgtcgttattgagaatgtgcatagtaccaagtgctcaggagattttcattcggttattcctcatggcaaactttgttggaacagcatggtatctccacattggcaggtgtgagaataaggcacagtgaggttgataaattttccaaaagtcacacacagccagcagtaaagccaagactggagattttagacccagatactgagtcacgtaaggcacccaggaggagtggccatgtggagaatgcggagagagttcgaggacctctcagcggcacggtagcaacctctttatcaggtccccatccatcccagtgacttgactggtcagcatggcctgaatttgcaaattgcatgttaacaaaagcaaaatagtttcaaaccatatttttaatagtgtcaaaggaaattgatttgtcattctgagaataaaggacataaacatgaaaaactgaatcccagattgctctgaagcactgtaaaatccctcataaacaggagcactgagaaataatacaaattaaaaattttaaaaataggcgtagcttattaattgggattcatggaggaatttaccctacggagtgaatacaccctgcggagtatgactctgacctctcttaggctggaaatgctgcctaattgaggaataaatttcttaggtaaaaactaattcttttatcctgattggattttctgtaataatccttaaaaattaagaaactgtctcattgaaaacagtaagtatttttcaagtcagtttgccaaaaaaaaagaaaatagttacaaaaaaaaaagttaccaggatataaaaaaaagtaggatccaacatagtatatagagaatgaggttaattatacacatataaatatgcatgtagaaaaaaaagtgactggaaggaaatgcacctaaatattaacagtgcacgaataattacttgattcaacctcacagtcatggctttagttaaaggagactcaactacttcgcccagtgccacccagaaggacagtggctgaaataataggacctgtctctcccaatgttcccaccagtgacctggaagttcaaatccagagtgtcccacaaaatgatttgggtgtttgtttgtttttaaggaaaatgaacaggcggaaaagatgaacatcagcctggctttcttcttgtatgaccttctctccctcatggatcggggctttgtgtttaacctcatcagacattattgcagccaggtgagtgtcccccccacccccacccccgagcgagccacttggttccttctcatataatgtgatgttcgttgccatggcacgctgtcttcttcattactgagttggcatgaatcctacacatcctgtgttttgcagcacgtccctcatgtctgtgccatggacattcctcagacatgctggtttaccttgattcctggagcatttaccgacagtgtagaagggtcaacagattcatctgtgggaattaaaatttgtgatatgatctgaatcttcaatttgacattcaacagaaaattaacatggctatacagtgctttcagtctttgacaagtccttgcgctcccagtctgaggtctcttttcacatattagggtaattaattaaattgctgttgtgatgctccgacttgaaagaacctttttaaagtgttcttaaataaaatcattcaaagagatttaatttcactgagcacatagcaaatatttcataaaccaagtgcatctatcagtgccatccccccagatttttaaatggaattattcatgtgctgtctccctcaaactaccttaacaatagtaatataaatagcagttattgttgctgctcctctccttccatatccctaatctagccactagtaccatcattactgctactactaccaccagccaccaccattctcattagtcccatgcccactatcaccaccttctccaccatcaccacctcccaccacctccaccacctccaccatcaccaccacctccaccatcaccaccaccacctccaccatcaccacctccttcaccatcaccatcaccaccacctccaccatcaccaccaccacctccaccaccaccagcatcttcaccatcaccaccacctccaccatcaccaccaccaccacctccaccatcaccacctccttcaccatcaccatcaccaccacctccactatcaccaccacctccaccatcaccaccacctccaccatcaccaccacctccaccatcaccaccacttccttcaccaccaccaccatcttcaccgtcaccaccacctccaccaccaccacctcctccaccaccaccacctcctccaccatcaccacctccttcaccatcaccatcaccaccacctccaccatcaccaccaccacctccaccatcaccaccacctccaccaccaccagcatcttcaccatcaccaccacccacctccttcaccatcaccaccacctccaccatcaccaccaccacctccaccatcaccaccacctccaccaccaccagcatcttcaccatcaccaccaccacctccaccatcaccaccacctccaccatcaccaccaccacctccaccaccatcaccaccacctccaccatcaccaccacctccaccaccaccagcatcttcaccatcaccaccacctccaccaccaccaccacctccaccatcaccaccaccacctccaccaccaccagcatcttcaccatcaccaccacctccaccaccaccaccacctccaccatcaccaccacctccaccatcaccaccacctccaccatcaccatcaccaccacctccaccatcaccacctcctccaccatcaccaccacctccaccaccaccacctcccccactaccaacagctccttcaccatcaccacaacatccaccaccaccatcaccaccaccaccaccacctcctccaccatcaccacctcctccaccaccaccaccattagctccaccatgaccacctccttcacctccaccatcacttcttccaccatcatcattgtcaccatcatcaccaccaccacctccaccaccatcaccacctctcccatcaccaccacgttctctgtggttagtcacttagtgactttagataagtttttccaattttatgggtcttaatttcctcagttttaaaataagaagggggggttgagagatttgagggctgatcaacgaaaaggataggaccataaaaagcagtgacatacaagcttcattgagcagcacttggacagggttacataagagcggaagcccctcccagcatgagaacagccataggcctgcagtgaggaggggaccatccagaggagcaggggaactcccaggggagaggaggattagggcagaagcttatagatctgggtgaggctgctccacagcacagtagggagtctctgggtcagagagctccaagggctgtagcagcttagggccctgtatctgcaaggctctatcttatcattaggaaacagctgtccatcgagattttatggggtctgcaaaggaggcaggcactaaatggatgaaaatctgcttatatgagctatttttgttaatgactgggcatggtaaaatttgagttaggtatgagccaagggatcagcaccagtcgacagtgaagaaataaacaaccgaggggccaatacacagaaacaatctttgacttgtttacataacacctctcctccaaaaaaagaaaaagacatgacttttctaaaggaagtcctgtctacagccataccaccctgaacgcacgcagtctcatctaagggaagtcctgataaggaagcagaataataaaaaagaatcctaaggaaacatcagaagtccccaagcatccccatcccatgcaccctgacccctgccctgcagcggatcttctgtcccaggacccaccagaatagaatggcagagggacacttcactcctccttgccctccctcttcagtatttaggattccaggttagtctgttttcaaaactttaagttgagtgtatgaaagataccctagatcaccactgcagacccaggcttagctactcacatgcaggctatcttcattcccgacagggaaataaggcaacccaaggtagatatctgccttccctgcaaaactcatgtttttattttctctttctctttcctttcttttctcttgctcactatctttctccttaaattcttcccttttcttttagttaccatttctttttttgtttctctccttgactcaaatgccaaagatccctagaccaggagtcaagaagcctgcatgctgattcctgggacaccattaattacttctgtgattgggagcatcagcctttgaggcattcatttcctcatctgcaaaaaaactaggctggattagatttatccactgattctgtggtctgtgtctgccagtgacatccacggatgttacttagcaccattagtggcactcaggcctcagaaggtcactgacccccattcgtggtgatttaattcattgatcccagctctctagatacaggatgaacttcataccttaagcaagttgtattcttacaaagtcgtctgactttatcattttgcataacctattatgttttctgccatctaaagattttgtggcaatggatataaccttagtcttttttaatagtcactaaaaatagacaaatccatttcctcaattactgtctgtcacttacaatgtgccactaagcaaacacccatcccttgggtaggggcattgtgggtcttgacctttgggaaggaagtttttggaatgcaccttactcctcttttcaaaacatcactcaaattgtttttgaaatgtctattttttttcttttgagatggagtcttactctgttgcccaggccagagtgcagtggcacaattttggctcactgcaaactccgcctcacaggttcaagcgattctccttcctcaccctcccgagtagctgggattacaggtgtgtggcaccactccccgctaatttttgcatttttagtagagacagggtttcaccatgttggccagactggtcttgaactctggcctcaagtgatctgcctgcctctgcctcccgaagtgctgggattacaggtgtgagccaccacacccagcctgaaatgtctgtcttgaatgatgtctcaagggacctatgaaagatacccatagtggggccttcttttaagtgccaatgtgttgtgggttcaagttccgatagccggcttgacccgacacctgttaatgagtaacctaagtgacaggcacatgaccaagttctaatcccttcaatgtgctggtggctccactggtccaaagtcagccaggagtgcacatcgaaaggttatgggatctggtaactgtgcttacatagaagtcatatgttttggttttaaaataatatataatggcatttacttattttaagtggatgtctaactatgaattaattctgtaggcaatatgtcccacaacacattggcttcttgtaaaatggctgaaaatatgtgttcatttaaattatattgtttagtctgtaatcccagcactttgggaggccaaggcgggaggatcacctgaggccaggagttcgagaccagcttggccaatatggttaaaccccatctctactaaaaatacaaaaaattagctgggcatgttgatgtgcacctgtaatcccagctactcgggaggctgaggcaagagaatcgcttgaacctgggagatgaaggttgcagtgagccgagatcatgccactgcactccagttcaacagagcaagactctgtatctctctctctctctctctctctctctctctctctatatatatatatatatatatatacatatatatatatgtgtatatatatatgtgtatatatatatatgtatatatatatatatgtgtatatatatatatgtgtatatatatatatatatagtttaaaaaacaaactactcttgaagtgagtgaagaggaggcatgtctatcacaaggatgatgcttcatatttctgtgctggggtggggggtgataatgatgaaatattgaggagctcaaggtgcatcagcgccccttccttcccctattttgcctttagaggagctgcctctgagtctgggtctttcagttgttcagcttgcctgggggaagcaaggggtctcttccagacagtcacctttttctgcttttcattgcttgcttcatggtttattttttaaaggaagatttttcctaaaaactcttctagctttctttctctttcttctccatttcctcctctctcagtctgggacaagctccttgagttttttgcaggtactatgtactttgctaaacagtttgatgcctttctctagggaactggttctacaactttccaatggggcctttaattagaaactacgagagaacacttgtagtataaaagtcatctagtcatattctattagtttcatacaggctcatatgaggtcaactcctttcatttagtttctcgaacatagtagagtttttgtaaaattaattatgttacggtgaagatgtacctcaagattttcagcacaggcttcccatggtattaaagatttgataaagtggaaatcgggataagaatcctcattctggacagctactaggctagaatcactaaggggaacagtaatgaatgaaaatttattagacctctctgtaatgcagaatttaccatctgttgcactatcccattagtttttattaaattgattgccttaacctggagagaaaggatatttttgtgtctgccaacctcaactccacttaccttgtaataaatgtttcattcctcttttcatttttcttcccagctgtcagccaagctcagtaaccttccaacgctcatttccatgaggctagagttcctgagaatcctctgtagccatgagcattacctcaatctgaaccttttttttatgaatgctgatactgctccaacatctccttgtccttccatatcttcccaggtaataaaagaattatttaactaaaagaattattcaagctatttcatttaactagctcagtttaatcatgtatttcctataaaggttagtcttattaatttgacaaaaaatcaaacaattcaaaccagatcaagtatgctaccctgaagttacaccactagctaagaattaacaatctaagtaattggtttctccccaggctcaaggctccctgatcaggttaagtaaagccaagaatccaataagccctatgaaatttagaaactcatagaaaagtctcaaatcttcctttgtctgacattagccaattgttatattatgcaaatagaggattccaaagtaaataagttttggaaaccatgtattcaccaggtttctttgcagcaggccctctaagaggttttaacttgttcatgtcaattgcaaatgcacgagaagcagaagaggaaatgggaggaggtgtgcatgataagcagtgattccccaaatgatttaacatggaaaccccaccccacctcatacattttttgaaatgttactctggaataactttaagaacatgctgtttgatagtcacattccatttatagggaacacatcagtagctcagagcatcaggcaaaatttctcattattaggttatatttctgttgcatattccttgatactagtacaaaagtgaaggcttgtcttactaattgaaaaaaaaatcttagccatatatgccatatggcatgatccagatattagctacatgaccatcttactgtgaacagggaaagatctgactcacaagcagcaattcaaaatgtataaactttttgctccatcctgcccagcagcttaagtcctaaaacttccctggactaagcttaccctaggttctttcccaccttccccttctgactgccccagggagtggccaaacccaggggccaggctcacaaaaccatgaaggatttctaaagacactttagatgctcttaatgaaatataaagtgtgctcccaggatacaaatacaggacaggaattactgaggaccggtaaatctaatacttccctccctgacatcacttgtagttccaggccagcaaaagtctgacaatgtgcttaagccaaattcagaagtgtagctgaggccgggcacggtggctcacatttgtaatcccagcatcttcggaggccaaagggagtggaatacttgaggcaggagttaccagcctgaccaacatgatgaaaactcatatctactaaaaatacaaaaatgcatcaggtgtggtagtgtgactgtaatcccagctacttgggacgctgaggcatgagaattgcttgaacccgggagagggaggttgcagtgagctgagaccatgccactgcaatccagcctgggtaacagagtgacactctgtctttcaaaaaaaaaaaaaaaaaaaaaagaaggtacctgagtaagcagggccttaaacaaagggggcatttggttacagaggaattgcctgttcccagccccaggactgggtgaggttcttatttctctgtccaacttttatgctaggatttttatcttcagcttttgatttcaggtgggaaagggagcgtcattcatttttcaacagacccggggtgctttattttcatctttcccgctgggcagtcttctctctgtgggtatgggaaagtgcagtaaccactctgtgcctcagtttccttgtccgccttatctggcaccagagtacctacctcactggggagggctcacgaagcctggctggggcgaggactcagtaaacactggccatcgctattttcattccagttcttgtggctcataaaatggctccttacgtttctgtagaactcaagctcctgctccagcttccaggaccagaagatcgccagcatgttcgatctgacttccgagtaccgccagcagcacttcctcaccgggctcctcttcacagaactggctgctgccctggatgccgaaggggaagggtatgtttctggcatttaaaatggaagatgaagccaaaaaaacagatgttctttaataaaatttgcagtctagcttctcacacttggtaaaaaactctactgtagttgaccagttctgaggagtagaaacatctgtcttgagaatatggtacccataagcacaaggcacaagaaaggcctttcttgtgtagaaaggcaccagggatgggtaagaactacaaaatgacttttcttggtcaactatttcagtggaatttaccagttctgctatagcaggtttcccaaggatgctttgattagtgaactccctaggagcaaagccatttttaacaaaggggatagcatgcagaggcaaccacaagatgtcacttggttcaaagctgatgaaggaaataatggctgctgagaaggcagctgtcccatgcccagattaggtttcttgcagacagtgcttctcaggccaagagacaccacacatccagggcttctgaatccttttacctcttatctatctgattactcagggacatgtggcagtatctagcctagaagtcaacagacagagaggtagaccacccccttctttccttctctccctatgctccgtgagctcatggagtcagaaacccacagcctatctgattggactgaaaaagataatgccttctaaaatattattcattccgttcaacaattattgaatgccttccatgggacagacacagttaggtgttagagtacatcagagatatatcagtgcacaaaacagacaaaattcgctgcccctcaagagctcaccatccagggactcagattcaaagatgattaggattgcaaagtagttgagattcaacacttctggtgtttagattaggcatacagaattgcaggaacttgcccactattccataacagagaacgaaatctaaagccatggtcttcccagtcccttcccaggacccactctcctataccaaaccatctccctgcacagggaacctgttcccatgactcctatgctaaagaggtttccagaataatgtttgctaattaatggtagcattgctgtatgttatggatggatttttatctaaatggaatttctcaagttctctcaaagtgcttacaatttagtgaaggaaacaggaggttcctgcatgaaacaaatacaggagcacatcgagttcgtgcaactgcaacagtcacatgtgtcccaagctatgtacccaggctgacaccgctgaagtgactctatgtctgcgtctcctggcaggatagtgtggggaatctcatgcttttagctctcaattctgcctccttccagataaactggcctgagtatatcctttgagaacttcactttccatggcttcaattctatcttctcttctcaactctaactaaatttctcccaattatctcagtagaatgttctaccctacaactaacataaatttccacagcaacaaaaagtgcaccgaacacttatgctaataagtaagatactgagaagaaagtttgaacacaaagaaaattgccttcatgcacaaacatgtacatacattttcttagttgtcctttaatagcagtactttaagtgatttctagaaacatctttagtatttacaatagcgtagtttctattttctattttcattctagctggaaacagccatgacattctgttctggattccttgtaaaattgttgctgttatattactagcaacaaggtagagtatattcagagataatcatgtaattatgtttaatcaggtagatacattcttcaaacacacacacacacacacacacacacgcacacacgcgcgtgcacatgcacacacacagtaccctttctcccccaaaagagtaattaacagtgtaactcctttggcaacacagtaatccctgattgctgggttgtcagttactctcctggaaagtcattagatacactgtcacaacttcatcatgtaagctaaaacctcagaaaaatgtcatgcttcaacaatacttcctattgatcagcacttcctttttttttttcttttgcttccaagacagttggtagacttgccaacacctgtacatccatggggcaagggccagaaggacgcatctcagtacctgaacccctagggagctacagctccagtttccactgggtttcccttggatctctgacacctgggtatatccacaagtgtctatgcatcgttaaatccacagtgtttttcaagcatttagaaattgtctatcatctttgtgttaagccagcaaattgcaatgcctaattcaaaacacaacccattgccgggaccacagactaagaacaagaaaaacttttgaaatgcaatttacaattatcttactttagccacagtgcaagagtctgagtcatttaaaattttggttaatattttctatataacgttgaattctgatgtagccttattttgtttgaaagaaaaaaatgtatatatatgtatatattttttaaatctggattctttttttattattatcatactttaagttctagggtacatgtatacaacatgcaggtttgttacatatgtatatatgcgccatgttggtgtgctgcacccattaactcgtcatttacattaggtatatctcctaatgctgtccctccccactccccccaccccatgacagtccccggtgtgtgatgttcccacctatgagtgagaacatgcggtgtttggttttctgtccttgcgatagtttgctgagaatgacggttttcagcttcatccatgtccctacaaaggacatgaactcatccttttttatggctgcatagtattccatggtgtatatgtgccacattttcttaatccagtctaccattgatggacatttgggttggttccaagtctttgctattgtgaatagtgccgcaataaaaggattataaatcatgctgctataaagacatatgcacacatatgtttattgcggcaagatgtatatttttaaaattgaacatctatgactaggttccagatactccactatatattttatttactttttattatagtataatttatataaagaacctgaatcctaagtgtaaagtgcgattaatatttcctgtgaatatatttgagtaaccaccagtcagataaaaaatataatattccattatcctctctcagttacaggcccccctcaagtaaccactattctgactcttattattagaaattaatactgcctgttgttgaatttcatagtcttttgctgaatgttgtgactgtgacatcctttagtgtggtcgcatgtgtcagtattcattttttttcaactgtatgtcatattcctttgtctactataatttctcttctgtaaattgacatttgggctgctttctatttgtgggtattgggtattatgaaaacagctgccgtgaacatgcctgtgcatggttttgggtggacgttagaactcatttctttggggctataaatacagcctattttttattttaatatactgctcttgaatagtttaataaatatgtgtacatggtcttaacaaaatgtcaaaagaatatactctgagctaggaaaagaagagcaaacaagtcaaagcaggaagatggcagggaataacaaaggtgatagccaaaataaatgaaataaagaatagaaaaacaatcacggaaatccgcaagatgaaaagcttgttatttgaaaagagcaacaaaattcaccaatctttagctgagctgaccaagaaaaaaggaagaagactcaattactaaaatcataattgaaagattcaacacaatcatatcacaagagaccttacagaaataaaaaggattataaaagaatacgatgaacaattgaaagccatcaaattgataacctagattaaatggataaattccttaaaaggtacaaagtactaaaattgactccaagaagatatagaaaatccaaatagacctacagaagtaaaaagattgagttagtaatcaaacttcccacatacacctactatgtacccacacaaattaaaaatttaggctgggcgcagtggctcatacctgtaatcccagcactttgggtggccaaggcgagtggatcacctgaggtcaagagttcaagaccagcctggccaaggtgatgaaaccccgtctctactaaaaatacaaaaattagctgggtgtggtggcgggaacctgtaatcccatctactcgggaggctgaggcagaagaatcatttgagactggaaggcagaggttgcagtgagccaagatcatgccaatgcactccagcctgggcaacaagagcaaaactccatcacaaataataataataataataatatattttaaaatttaaaacttcctacaataaaagctcaaacctggggggctttactgatgaattctaccaaatatttttaaaagaattaattctaattttttaccaacttccagtcttctcttccaacgaatggaagaggtggaatacttccccacttgttctatgaagctagcattaccctatactaaaccagacaaagacatcatgagaaaactacaggccagtatctgatgaatatagatgtaagaccctcaacaaacactagcaaactgaatccaacagcatataaaaaggattatacaccatggctaagtaggatttatctcaggaatgcaagataggctgcatacctgaaaatcaattgttgtaccatattaataaaataaaggacaaaacccatacaatcatcttagtagatgcaaagaaaagcatttaataaaatctaataacgcttcctgataaaaacactcaacaaaccttttaggaaataagagaacttcctcaacttgacttaagggcctctatgaaaaatccacagctaatgtgacacttattagtgaaaaacagtgctttatccctaagattaggaacaagacaaaaatgtctacccttgccacttctattcaacatattaggagttctatctagggcaattaggcaaaaaaataaaacaaaagacatctaggccaggcgtggtggctcacgcctgtaatcccagcactttgggaggccaaagtggacagatcgctttgagcccaggagactgagaacaccctgagcaacatggcaaaacgccatctctacaagaaatacaaaaattagctgggcattggtggcttgtgtttgtagtcccagctacttgggaggttgaggctggagaattgcttgatcccagaaagcggaggttgtagtgagctgagatcacgctactgcactccagcctgggccacagagtaagaccctgtctcaaaaaaaaaaaaaaaaagaaaaagaagaaaagaaaagaaagcatttaaattggaaaagaagtaaaactatctctattcataggtggcataatcttgtttatagaaaaccataaggaatccacaaaaaactccattacaactaataaatgaattcagcagtgttgcatggtataagatcaacatacaagaatcaattgtgtttctatacacttacgatgagcaatctgaaaatgaaattaagaaaacaatttcatataaaatagcatcacaaagaaaaaatatttaggaataaatgtaacaaaagaaacacaagagttatacactaaaaatgacaaaacactgttgaaagaaagatataaataaatggaggatatcatatgttcatgaatcagaagacttattattaaaatagcaatactccccaaattgatccatagattaaatgcagttcttctcagaattctagcttgcttttttttttttttggcagaaattagcaaactgatcctaaaattcgtgtggaaattcaagggacccagtatagccaaaacaaccttgaaaaacaagaacaaaattggaggactcacacttcccaatttcaaaacttactacaaagcaaaagtagtcaagactatggggttctgacatatgatagacatatagatcaatgaaattgggttaagagtccaaaaataaatcttcatatttatagtcaattgatttttgacaagagtgccaaaacaattcaatgggggaaaatagaattttcaataaatggtgttgggacaactgggtatccacactcaaaagaatgaagttggaccctatattacactgtatacaaaaactaactcaaatagatcaaagacctaaatgtaagagctaaaactataaaattgttacataaaattatagaggtaatcatcatagacttagaaaaggcagtggtttcttagatatgacacactcgaaagtatgagtaacaagaaaaaaatagataactggacttcagtaaaattaaaacttttgtgatttataggacaccatcaaaaaaatgaaaaggcaacacacaaaatgggagaaaatatttgcaaatcaaaaacctaataggggacttgtatctggaatatatattttaaaatcttacaactcagtaataaaaagacaaataactcagttttttaaaaggcaaaagatcagaatagacatttctccaaagaagatacagccataagaccatgaagatgttcagcatcattagccgtcagggagatgcatattaaaatcacaattaaataccacttgatacccacgaagatggatataataaaaaagacaggtaataaagtgttggcaagaataaaatggagtcttcagacactgctggtgggaatgtaaaattgtgcagccaccgttgaaaacaacttgctgattcctctaaaagttaaacagaggctgggcgctcggcggctcacgcctataatctcagcactttgggaggctgaggtgggcagatcatttgaggccaggagttcgagaccagcctggccaagatggtgaaaccctgtctctactaaaaatacaaaaattagccaggtgtggtggcaggtgcctgtagtccccgctacttgggaggctgagtcagaagaattgcttgaacccaggaggtggaggttgcagtgagccgagatcgtgtcattgcactccagcctgaacaactccatgtcaaaaaaaaaaaaaagttaaacagacagttaccatacaagccagcaaatgtactctgaggtatgtacccaagaaaagtaaaacttaaaacttgtatacacatactcatagcagcgttggtaagtcacaatagctcaaaagcagaaacaatccaaatgtttatcagttgatgaatggataaaattcaccaatggaatattatttagcaataaaaaggaatgaagtactgatgctacaatatgataaacttaaaaacatcatgctaaacagcagacccagggttagaacacaggcagtctgtttctggattctatgtagttctatcctatattgcttggttttccagggttagaacacaggcagtctgtttctggattctatatagttctatcctgtattgcttggttttccagggttagaacacaggcagtctgtttctggattctatgtagttctatcctgtattgcttggttttccagggttagaacacaggcagtctgtttctggattctatgtagttctatcctatattgcttggttttcacagtcacctcattgcttaggagcgttttcatcactcttgactgtttaagagctctttagtcaatttcctttcaccataacctcttgattcctgtgttgtgccaacagaatcagcaaagtacaaaggaaagctgtcagtgcaattcacagcctgctaagttctcacgacctggacccacgctgtgtcaaaccagaggtgaaggtcaaaatcgccgccctttacctacctttagttggcatcattttggatgctttgccacagctctgtgactttacaggtaatggcccttctgttttctttcttggattgttgggggcccctgccaaatgccccatccgaatgagatctctgtcattcgttccagtgctgatatgttcatatgagcaattcttcacaaaaatggtctccaaacctctttaacactggccccaatcagttaaaaaaacaaaaaaagtcacatagccccatatgtgttttttgtttagaaattatttacttgtttcttcattcattcatttattcattcattgatctgctagtatggaatgaactttataaaccatacaccacaaaggatgaaataataacaagattactgcctttggagatcgtgctctaacaccttgaaataaaggtgttccttcccttttcttttatgaatatgtaagcaaaaaagcggtctcaaatgaacccaactaattgctccatgcaaaaaaaaaatcatggcatatgtcaatattagaaaattctatcatagcagagaaatattgcccttggcactaagtgactaattttgaggttaatatgtctagattagcaacaagatgaaaggataagttgtcttaaaggggttttgtgaaaccccagaatctatttacaaattacattgtggattaaggaatgtagagggaaaaaaatcctcccaaatagaagaacttcttatgttgacctgagaaaggcagtccattggcctaccctctccacagcgtacgtgtgtgtgcacgtgtgtgcgcgcgtgcacacacacacacacacaattcctatcccatcagagtagttcttgcttttcctccagctcaagggaagttttggaaatgtccatgctgctctcttggcagctgaagggtgctgggatctgggcaatgcttccctgagccagcctctttatagtcagtcatccttgaaatcttggaaccatccaggttttcccacctcctccaaatggaaagtgtcatgtgtgactaaattgtttataatactattacggtgacaagtatttagttcatgaaaatgggaccaaacgcctatagtctttaattcatacaaatcataaaatgaaaagcaagtattcctgtggaagtaattctctcctttcttgaaaaaaatcctctagcaaactgctaatggagtaactcagaagagaaaggttgagacaggggttagggtttgtagagttctgttggggccagagtgcaaggaaatgatagaaacaagctcagcacacagggctgagcaagctgcaccatgaggtcagcagcttcctctagcagcgcctgattgcgcggaattgaaaatggagttgtttttaacatttacagacataatgcagagcatggcatgtgacttgtagcccattttgagaatccttgatggcaagtttctaaaaagttccatttcaagagcttgcttgttcccaaagccaggaaccactttagcacacattatccgaagttttcttgtcaattagaatattccgtatcagtgactcggaatcagaacttttcaacatttggtctccaagccttttaaacctcaaagacttctttgtatatgcgttgaactttatgatcatgatgtagctgatgagagaaaaaaacagtgaaaagtattttattgttataggttacacagtacatctattaaatatggaatctttaggttgataaactcataagaatacagtctttcaaaaagatgcatctgaattcagattccagccccatttattaatataagtgacctttgaaaggctcaacctttccgtgccttcctttcctctgtaaactataaaaatgtgataacgatgtctaccttttaggtttacgataaaggtgaaactagagaacttctataaaagcattttgcacagcacatgtttgtatctttcccgatttttcttgtaactataaccctatggcaattaaggggaaataagaatgtgtctctatgttagttgtgataatgttatcaggtcttgcataatttccatgtgctgtttatttaaccatttgtttaaaatcccaatggccttaataagtatttctaaaaattgggttttggctcggtgtggtggctcacccctgtaatcccagcactttgggaggccaaggtggacagatcacttgaggccaggggttcaagaccagcctggccaacatggcgaaaccctgtctccactaaaaatacaaaagttagccaggcgtggtggcgcacctgtaatcccagctactcgggaggctgaggtaggaggatggaggggcagagattgcagtgagcggagatggcgccactgcactccagcctggatgatagtgtgagactttgtctaaaaataaataaataaataaataataagaactgggttttgttttcacaactttagtagaagaaatgttatttacactcaaatttttctaaataattgaaggcccagatggctgtaatgtcaacaggtctagaaaaacatgaatttttaggaaaacatgagtgaatcaatcagttgtgaatgttttaccacacttttcccagaactgcttgaaatattaatagtttttgattgtatactggtagcattcttaaaaaccagacttttaaacggtttatcgtttttttgcttgcatacatctagacctatctataaatatgggtatgtctatattacatagatacaataaattgacattcattttaaacatttgaaatatgacaaattattgctgaacttgtgataatagcttattattctatataaggtagttgcttaattctgtaattgtaggtgtcttctatttggtcattatttaaaataatgccaattattagaatagagaatgaagtttaaaaaattatgttacaggaaacaattatggaaggtttgaaaactttttgttcacacaatttgaaaaattaatttctagcctaatcttgtgctagacattgtctcttagcctgctgtgttttcctataggtgatagcagatacataatgctaaacatcaggtttgaaattactgtgctgactttagtgactgagaagtatcagtctcttattgggtaggggacatggggaaatgtcatgtttgacttgacatcacaaacgatgttttcattgcagttgcagatactcgcagataccgcaccagtggctcggatgaagaacaagaaggagccggtgccattaaccagaatgtggctctggccatagcagggaataatttcaatttgaaaacaagtggaatagtgctgtcttccttggtatgttggtgcacatgtgtctggttgatttttcatttcatgtcttctgtcttctgttttgttttgtttgtttgtttgttttgagacagagtctcactctgttgcacaggctggagtgcagtggcgcaatctcagttcactgcaacctccgcctcccgggttcttcatgcctcagcctcctgattagctgggattacaggcgtgcaccaccacacctggctaattttttttgtatcttttagtagagacggggtttcgccatgttggccaggctggtctcaaactcccaacctcagatggtacacccacctcagcctcccaaagtgctgggattacaggcgtgagccactgtgcccagcctcttctgtcatcttctgatgggagaactcagcttagagcaggcattgattatttccgcctcattttgctggaaagaatcattgtgaggctggcagctgaggtgcacacaagtcagaaagggttctggcaacagcaagagatgtgcagatcaaattcaggcagtcccagtggtgctgagttcaagttcaagaaaccggaaaagaggaaaacttgggaaatctgaaatccttgcaaaggagatcaaaccaaggctctctgagggtggaggcttaggctgtgttcagtctatgtgtgtgtaattcatacagtgtaatgcctccaaaaaaaaagactgaaggaggctggtagcttagcgtaagggcttcttaaacaagactgcagcttttctaggaccccagggagcctaaggagggttgtttggctctgtccttttgcatggactctgtgggctcaaagaggggctcctctgggaatgtatcctctgattcagttgaggtgggattcatctctgttcattgatgagctctgactatcccttgtgaagacagcactgcatcctccaatgtcatttactttcacatttcaatgtagggtatagatgtgcagagaatttaactttcttctcccgtgagaaagcagcatcctgacctaactcttcttgctggatgactttcttgtcttccttcctgcacttagcaagctccatcaccatgaggattggggggacagtgaggcaggaagatgagacagagaaaagacatttgagatttgacatcaccgatcttactgttggagaaatattgtgtgacctcctccacctttctaatatccgtcttaccaaagttagctgcttgaggtggtatatgccttttacattatttgcctctaagggaaaaactcaaaagcccaaagttcacctgttagaacatagtccttgtgaggttgtatctcaagatttcctttattcttgtcaacaaactcagaataactaaagttaaagttgctttataacctctattatttccatccaaaactaacatttccctcccatacccacaaattcctcattgcaatttcaccagtacattccactggatattagctacgctgcatgaaccaagggtgcagcctcattgttgttgtttgtgttgatgagatgagtaacagagagtgcgctcagcactttaaaatgaatacttgtggccaaaatattaaagcaaatagcctgaacccccacaccccagccccaggcaaacataaattatggttaaacttccattacagagaactccacaaacatggatttgattaatttgctgagcagttcatgacccttatgttatactttgcactatgtaacaaagaagctaaatcttgaacagcaagcttattcatggcacccagccagtttccttctcccctgtaagtctaaccctctgctgcccagcacgaaggagaaatacttggagatcttagcagcatgaaagcctctttgtatcactgggattgcagcacgcatgatcaaggcccaggggtgatcaccaggccacactgctcctaagacagaggtactcagatacgtggctgaaagcctagctcaaatactgccccaggtgagcctctttgctgagtagcgctactcaaagaacacagcttcccctgcctagggaaggcagggctactggcaatagatctccagcctagcagtgatgtacagtcatggtattttaagagaacactttgaatttttctgttgcttgactgttaagcctcaaatttttctgttgcttgacttcttccctggcctccatcccccaatctgcctcccttcagccctataagcagtacaacatgctgaacgcggacactactcgcaacctcatgatctgcttcctctggatcatgaaaaatgctgatcagagcctcattaggaagtggattgctgacctgccatcaacgcagctcaacaggattttagatctacttttcatctgtgtgttatgttttgagtataaggtaagtctggagtggcacaactttataccagctcttatctctcaattgcaattctgtcttcttactcatcccctttgtttgggccatggaggcatcattaatttttctcatttctgtattcaaatccataacccatttgtaggtatagatatgatcatttcacagggaaaggatctctgccttctgcagagagaaccccatttctgttgacagagttttggcccataggatgctccagagcagcatctcagtgaagcacatgtcaaacttagctggcatcactgtggagtgtactgttttggtaactctccccatcaacggagatctcaccaaaggacatgtcctcctacctctgtcttgtccagggaaaacagagttctgacaaagtcagtacccaagtcctgcagaagtcaagggatgtcaaggcccggctggaagaggctttgctccgtggggaaggggccagaggggagatgatgcgccgccgggctccaggtgtgttggactggcccttccctgctctctgtcaagcagtttttcactgtttgtggggaggaatgtcctcccaacatgattagacaccattactttcttgagatatttacggtagtgtcagagacagcggattctgggagtctgtgtgtgacatttgtgttagccctgtgcctgtgagggaaagcgctgttctacaattgtaggaaccctgaaaacagcaccaaatgacatcttttaattaaaactcgttgatggtaaaaggtcacctctaagaatgtcagtcatggatgaggtggaaggtgtttccctcaaggctgaggcctttctatgtgacctttggctagtctatccggagcatggtcaagaaactgaacagttctggccccaagatcatcttctcgatcattcagggcactattagaatggaaccagttccctgaaatggcttcagagtgtcccagtcattcaaggattccaccacaggaggaatgatctcaaaaaggctgagcttgaatagaatgaaatccccaggtaccctcagtcttattcaccatgctcaaagtaaaacagagtgacagcttattgtattcgaagggacacagtggcagggaacttggagggagctcatagttttcagtggtggtcaggcaccctcatttgacacccatactttcatacccaataattcagtaagcccccagagtttcacaggaatcctctgctcatgagaaatgtctctctgacactcagaaaggcagaggttcttcttatattctagtctatcaatcaaagagcgggccaacttggacataggtgtggcgactttgtctcctaccagcaacctgcatggactctaattagcccgagaaatggtgctgaggcttctcagttgagcttgttatgaacttctggttatcttggagggtttcatgctaatcaaattcctatcatgcatttcttaactcctagggaacgaccgatttccaggcctaaatgaaaatttgagatggaagaaagagcagacacattggcggcaagctaatgagaagctagataagtgagtcactcggcaactttctgctacttttacctaaagtccaaaactatttttcccaggctgcttgtattactgaaacaactgcatccttccaagggttagaaaatgaaacatcattatctgtgtaaatacaattcatccagggacccaggataatcaaaggtatagggagttgtggtttccagctcttaaaaatttgtcacattgataagcatgtaaagaaaactaatatttctttagcaacctcagatggcttaataaaagcagctgattttgcagggagggtagcagggaaatagagaaagcaggacacggtgcctaggaccgtatactttcaaatcgatatttcctttctggaaatatgtacaagatatacattcagatatatttatgtcagtgctacttaaagttgttttttaaaattgaaaacattctaaatgctccagaatagaaaaatatatttaaaagttggattgccatcaaaatgttttaaaatcatcttaatgacatggggaaatgcttatgacataatgttaaatgaacaaaggcagggtagacacttggttttctagtagtgtgtggctcacgcctgtaatcccagcactttgggaggctgaggccggtggaacacctgaggtcagtagttcgagactagcctggccaacatggtgaaaccccgtctctacaaaaaatagaaaaattagctgggcatgatggcagatgcctgtaatcccagctactcaggaggctgaggaggaagagtcgcttgaacccgggaggcagaggttgcagtgagccaagatcgtgccattgcactccagcctgggtgacagagcaagactccatctcaaaaaaaaaaaaaaaaaaagaacctcaaatctctgatgacatatagtcaatgtattttttaaaggctagaaggaaatttaccaaaatattaattgcggttttctttgggtgctgggaatatcggtaattgatgttttctcttttatactttgctatgtttcctacagtagatgtgtattataatatatattgttaccagaaaaaaaattataaagaaatgaaagaataaaaaaacctgtttggatcaaaatctatgctatagatgaatagatatattgacgtgtattgctatatatgcaacaatttagacatatgaaagctaaaagtatatatgtttgactagatagcacatgtttccgataccgtttagccacaggtagcctaatgagtcccagggtttgctgagcaaaatgtcgtagagctaaaatcacccctcacacacagttgacaaggtaggataccccatgggtgatgaagcacccatcaaagggggtatggggcagacttgattagcagtgctgttttgtaaataaatgtgagttaatatctttattgttaccacaagaatgaatcattctggttaacttatgggactttggggagtcacatttattttaaaacattaaagaaataagtatatttttattatagatgtgacttggaaacccagttgttggtatcatgcctatttgctttgggtatgttattcttgcactaaattccctggactgatttataaaatacttggatcggagagtccatacattctacttcgggcaatgaacaacaactacaaaatatgcatgccgtgggtgctacagaattgcttaggtggtttagctcatctactctactagattaaaagaagacccctaagtaggcctgttttgcctgggctgtgtaaactggtgttttggaaaacctttcccttttgcttgcaggagcaacacaatattggtccttaccacgcatggcctaccggtttgctctaggttagttctcagccctgcgctacctggtgggctgctggttgtcagagctaatgattcacatctacaaattctcaggggctttgtgctttttttttttttttaaaagggaaaccatagtaaaattataactgttcaacctacctacctggaaaatttataattataataatggtgtctttcaccctctttctgatcatttttcgattattttggctctgtttcttttagagcaatgatcttcaacttaggctgcacattagaatcacctggggagctttaaaacctgtcagtgcccagctgcaccctagactacttcaattggaaactccagcaggacccagaaatcagtatttggtaaaacttcccaggtgattctattgccaccaaatccattgttttaaaggaatagatggtaagcttttcttttcttttttttttcttttctttttttgagacaaggtctcactctgtcacccaggctggaatacagtggcacaatcacagctcactgcagccttaccctcctggcctcaaacaatcctcccacctcagcctcccaagtagatgggactacaggtgtgtaccaccacaactgcttactttttgtattttttgtagagacagggtttcaccatgttgcccaggctggtctaaaactcctgggctcaagtgatccacctgttttaacctcccaaagtggtgggattacaggcatgagccactgcgcctggtcagatggtaaagcttttaaaaaaccagattagtgttagtgatggttgcacaatatgaatgtacttaacactactgaactgtatacttacaaatggttaagatggtaaatttttatgttaggtgtactttatcacaatacaaaaatttgggaaaaaacagattaggacactctagatttgtgctgtccaatacagtagccattagccacatgtgactatcaaatgcttgaaatatggctagttcaaattgagataataaatcaagataagtgaaaaatacgcaccagattttgaaggcttattgtgaataaaagaataaaatatttcactagtaatttttatattgcttacatggagacagtattttttatcttttaggataaacaaaatatattaaaaataatttcactttttctttacttttttaatgtggttaccacaatatataaaatgacatatgtggcccccattgtttctactagacagcattgctctaaatttaaaactaaactagcagtcaattaattaaaaaggatgataaggggccgggcacagtggctcacacctgtaatcccagcactttgggaggccgaggtaagtggatcacgaggtcaggagatcgagaccatcctggctaacgcggcgaaaccccgtctctactaaaaatacaaaaaagtagccgggcgcggtggcgggcgcctgtagtcccagctactcgggaggctgaagcaggagaatggcgtgaacccgggaagtggagcttgcggtgagccaagattgcgccactgcactctgcactccagcctgggcgacagagggagactccgtctcaaaaaaaaaaaaaaaaaaaaggatgatgaggttaaaatggtaaatttgatgttatgtgtactttatcacgatataaaaatttgatggctcatgcctgtggtcccagatactcaggaggctaaggcagagcatcacttgagcccaggagttcgaggcttcagtgagctatgatagtgccactgcactctagcctgggtgatagagcaagaccctgtctctaaggaaaaaaaaaaaaaaaaacttttagatttcatttattttacacatatattatcacttggaaaatgagaaaaagtgtcaagtggcttgggaccagagagcctatcctaaacatgaaaacaagtaaaacacacagaagtacttattttttgagtcctcagtggtatgtaagcagctgcagtgcccccattattaggttaatgggacgcaagaacaggtaagtggtaaccctggcccaggacatatgagctgatataatgataccccaaccccatggtaacatcttggctactgaggcatcttggtaaagtcaattcttcatacctccctttccttgcaactagatttggatgatgatacaaaatatccctttacagcttcacttagatttcataagaatggatgggctagcaaaaaaaaccattctgattccttaaagtgaaacctaatagaggagcgagcaccaggcaatttcccattccctagtgggcaatgaccagtaatgtccggcaggatattagatcacctgccctacaggaatacagtcttgtttcccaatggaaaaggacgaaagaccccacgcacttggctgagcaacctcaaggtgatctttgggaagttaagaggctgactctcccctgacttggctctgaagctccaccctttcctaacccagccgcatcactgccaagttcacatcacatccagtctcactctctctcgcatgttgcaggggcttccccttactcagatctagcaatggttttcatgcgtgaaatacagccatggccctgaggctttaggcaacaatctgagaggggagcttaattgctagtagcaactaataactgcttctctacccatagtgttatttttataattgtcctcatcattattaataatagtggggatgaggatgaccaggaaaccttacctagacagttgtttcgacaagacatgaatcacagaaggcacctgcactgtagttactcagggccagttgctctgttttcatttcaaggttgactattttggagatttctttacaccttggtgtatagattgccatcatgggaacctggccaggtttgacatgcgctttaatttgacctcttgttgtttcctagaacaaaggccgagttagatcaagaagccttgatcagtggcaatctggctacagaagcacatttaatcatcctggatatgcaggaaaacattatccaggtgaggaaaacaaacacccaatctgatttgttggccatgaatatgtttactagaataaggacttctttatgcaaaattgtgaaagacataaatgtgatcccatagtaccttttttaaaaaaatgaagttgagaagtttactatttacaacagtgtctaccttataaattccagagataccaaacattcttctggcttctttgacttagggcttacttggagagggttaggtgtttggccagctgaccctcttggttaaatctgtgtgagtatgtaccaagtttataatatggatgttgggtttatcgtttagtatctagaacagtagtggtaagtagaattttttctgatgggtcaactccagttgaatgatggtcactgtctgatatgggagctatgattatgactaggctaggtaaaaagagtgctaaatttgacaaatgatgtcttctttggacttaaatttgttaaggaaagtcatttgtaccatgaatttgccatccctgctgtagaaaaatatagctttgtgaactttgtaccatactaattttatcttctatgtgattatttccacaaattcccaagctgtctaggtaataatgagtttttaattaccctgaaaaatgagttcttacatgtttccattgagaagtcattcattagagtaggtccaggattgcttttagggctagaagaaatatcgttgaaacacagtgaaatcttaattctctaacttttgaattgtctaaaatcaaagtaatcatcatacaaaaataaacacaaaaagtatgtgatatttttgttgactttaatatctttgataacttaaatgcttggtatcacatttaccttatctttatatagcacaatattaggtgccaaatatctatactagcccccaaatatatttgcagttttcaaagaaagctgaaaccttttgttattatccttggtgttgttagtccttctgtaggtgataaacaagcttctatttagaaacattgctgccaccaagcagcccctgttgtactgggaagcccacaattgtgttttgcatcccataaggaaagctatgtcttgtatacaaagaaagaactttccaaaagatgtgacccaggatgagggagatgggccttataccttcatttaggaacccagaattaggtataaatcccaaactcattggaagcattgaaataaagccatttggaaataggtcttcagttcccatggttaatggatgatacccatggtggctcaccaaactcttaagactcaccactggacatggaacatcagcattactgagctaattgtcaggaacatccagttcattggcacagtgcagggattcaatgatgctgttcttccattcccccaggcgagctcggctctggactgtaaagacagcctgctgggaggtgttctgagggtgctggtgaattctctgaactgtgatcagagtaccacctacctgactcactgctttgcaacactccgtgctctcatcgccaaggtaaacttgggatgcttgttttcttcctcttaattaagagtaagattctcatctagcttcatacttctctcttcaggtggaccaaaagtcacagagcatattaagtggcatcacagtaaaggtcttaagtcttcctaggaagaaagcagatgccctgattctgtgggaagccaccatggagaggaaaagcagtggctcccatatttgaagtgtggacctaactctagaagtttaaaatggccattcgctgaaggtctatgacatgagaacagagatcaactgagtgacttagcaatttcactctttctctgtaatacctctgctgagtgagattaaatcctctatgtgacgcccattagtcttacaaaatgtcatgccataaaatgccaggaaggtcagaaatgaatttctcacggcctgaggaatgaggattatcctggggtaacatgcagattatttttccctttatttatttatttatttatttttgagactgagtctcgctctatcgcccaggctggagtgcagtggtaccatctcagctcactgcagcctctgcgccctgggctcaagcgattctcatgcctcagcctcctgagtattgggattataggcgtgtgccaccgcacccagctaatttttgtattattagtagagacagggtttcaccatgttggccaggctggtcttgaactcctgacctcaagtgatccacctgcctcagcctcccaaagcactgggattacaggcgtgagcccccgttcctggcctatttttccctttattgaagatctcaattggtgccttctacatggggtcttttaaatttaaaaagtaaaattcttctgctcatccttctcaggaccattttctctttcttcatcaccagtaatttcccaggaacccaagaaactcaggtttccttccatcatagttgtgatttcaccagtgaatgcgacctggctcacagtgcagttgataacacagctctgacccttttagctggacagttcattattaaatctcaagtctactccattgcttaaatccatcttctgattcacatagctcattatctttatggaataatgcattaactcttctaggctttttgcttgtccaaatggacatttgcatatttcaacggtccagaaagtgtatcaaactgccaagtgatgcctaatggccctttatgtctctcctagtttggagacttactctttgaagaggaggtggaacagtgtttcgacctatgtcaccaagtcctgcaccactgcagcagcagcatggatgtcacccggagccaagcctgtgccaccctttacctcctcatgaggttcagttttggagccaccagtgtaagagttcaaaccagctgagtgacctggaatcagtagagaaaaattgatgtaaagcatcagctgcgaaaaaaaataaggaaattttgcagtattgcagtttacttctgtcctgtgagaaagaaacaattgagtatgtagatagatagcagcttccattttaatttgcatctaaaagtgaattcatcagataaatgcagtggtctctatcagtgtgtttctaaaatagacagccaggggccaggaacgatggctttcacctataatcccagcactttgggaggccgaggtgagtggatcatttgaagtcaggagttcaagactagcctggccagcatggtgaaatcctgtctctactataaatacaaaaatagccagatgtgttggcgcatgcctgtaatccaagctacttgggaggctgaggcaggagaattgcttgaacctgggaggcagatattgcagtgagccgagattgccccatttcactccagcctggacaacagagtgagacttcatttcaaaaaataataataataaaataaaataaccaggtgcagtggctcatgtctgtaatcctagcacttcgggaggccaaggcaggcagatcagatgaggccaggagtccaagactagcctggccaacatggtgaaacccccgtctctacaatacaaaaaattagccgggtgtggtggcacacacgcccgtaatcttagctactggggaggctgaggcacgagaatcgcttgaacccaggaggcagaggttgtagtgagccaagattgtgccactgtattccagcctgagaccctgtctcaaaaaaaaaaaaagaaagaaagaaatggaagagtattttagattaaaagttatcatctgtgggggaaaaaatacaatagacaggttagaattcagaagagtgtttcctgtttctaaattctgactagctagtgccagaatgacctgtggaagaggattttaaatgatcggtgtcatctaacctgagttttattttaatattttatttatttatttattgagacagtgtcttgctctgtcacccaggctggagtgtagtggcactatcagagctcactgcagccttcaactcctgggctcaaatgatcctcctacttcagcctcccatgtagtaactgggattacaggcacgagccaccttacccagctaattttttttgcatttttgttgagacagggtcttgctgcatgcccaggctggtctagaacacctgagctcaagtgatcttccctcctcagccccccaaagtactgagattataggcatgagccatcctgcctagccaagacttgagttttattcaaagctacgaagactttggagttcagctttattatagaacagtcaagtttgctttagtttgtctagattttgataccttctttggaatttccatttgtggccatgttaataagtatgctcaagtgatatataaagataaattggcccatggaaaaaagtcagcctcctccaaatgtattagggatgattatttaaaagacattcctcaggggaccttgaggtagccatgtttttccatgggcctgtaaagaaagaagaaacaaaaccttgttgcttacccggagttcaaaatctcagaaatgctggccacagaagtcccctgatttatttatttagagacagggtctcgctctgtcaccgtggctggagtgcagtggcgagatcttggcccactgcaacctctgcctaccaggtttaagcaattctcctgcctcagcctctcgagtagctggaattacaggtgtccaccaccatgcccagctaatttttgtatttttagtagaggcggggttttgctgtgttgcccaggctgatcttgaactcctgagctcaagtgatccaccctccttggcctcccaaagtgctgggaggctgagccagaagtccctttcttttaataaagtttaaataaagtcccaagaagaaactcttggcacaaaaggatatactgtattcttggacccaactttataagaatcttccagcttgcagcacaaaggcagcccagtcctcaatgaaaatttaaagggagcctgacagatttatgtgagagcaatgtccatttaaaccatttaaacaacaatatgaatgttgtgcaaagtgtagctcccatttcattgagagaagaggaaataattaagacggggcaaaggaaacactgaggagttgtttgtgtctggccatgctgctttcagttatctactgctaagtgtgtcttatttacttcatcttttttttttttttcactgatgcagaattttgcaagagtaaagatgcaagtaaccatgtccctggcatctttggtgggaagagcaccagactttaatgaagagcacctgagaagatccttgaggacaattttggcctattcagaagaggacacagccatgcagatgactccttttcccacccaggtacaccgaagcacataccttgtctcatgcatgagtttgggatctgccaactattgtgtatgtatgtatgtacatatatacacaatttatatataaatatataacatttgcaagtatttattgtccaatatgcatgtgctctcagcactctgagaggttttaaaaagaaatacatccatcactgtccccagtctcaatatgctaacagtctatttggagtgctcagtctcaaaacaattaggaggcagtacaagacaagtgatacataagtgcaaactgtgtggtaaggagctaaatgctatggaaggttagaggaagagaggtcgtgatcaataaacaatctggtggccaggaaagcctgcagggagggatgacactaaaggctggggtaggattccgctaggcaggggaaaagtgagggggaaattgtgagtagttgaaacaatgaattgtttgtatctgtagggatggtaaagggaccagcttgtctggtgaggggtaaggaagggccgagtttgagagagcttgtaaacaaggttgtcctaaggaaatgtgtaaggacagtcatctcttccatgtccattacgatgaccgtggaactctagcctgtcccatttgtcttttaactccagctcctagcctgctctatggtagggtcttaattaagtgagaatgaatgaatgaatgttttcttttattcccttagtctgagaaccctatttccggagtctgttttgccctctcgggcaatgttgcatcctcattctcagaatctttttcctctcctctacatcaaatcgttcctctctcatttcatcttgaccatactcctttagttccatcatttatatagaggtattcaccaacaagaccaatcaaactatgggcagtttaataaaggtcttcagtgccttcacccaatgaaatgactctagtggtagaaattttaggagccctggcaagctggcagaggggaacggggataagacaacattctgtggctgagttacctgccagggtctctagatcaagccatagtctctccctgtttttgtactgcaggctcccctggacctccactgttggttttataattaagaataaatgattacaagaggttctaaaatctctgaagccctgggaagatccaggaggcttctgagacatggaactcaagctgaggtcctaagctgcttcctacttggtataaaaatccctgatattccagagtagagtttagaacttttcaggttacaaataactgaaactggttcaaactaatttaaacaaaaatgttggagatagagatagtatgaggattcaggcagatttctggatctcaagggccaacacacatccaggtctcataaactcctgggctggcgaagatgaaaactacagagtcaggtctagatgactccgccatccctagtctctgctgccctctgatccaacccttcccatggcttccccttgcatttcaatgtaatcctaactcttcacctgggactacaaagctaagattattttgaggcttacactttttgcaggtggaggaacttctctgtaatctgaatagcatcttatatgacacagtgaaaatgagggaatttcaggaagatcctgagatgcttatggatctcatgtacaggtaagctttcctgacacactcaagggacaccatttgggggtcgaggatttgtcactgtggagttcttactaatgtaatgatcacagctaacatggatatagtgatttggatgatagccaaataatatatagaaattaaacattcagagtaggttaattcatatgtaagttttcagaaggatctccctaatttaaagtgaggcataataatgttattaaatataataacattattaaatataataacactatcttctacttaccacagaatcagagaaagaataattaactgttataggaattattttccatatgcttttgttccaattatattcagacatacatatatagttttactttagaaatcattttttacgcgtagtttaaaagttggtcttccagtccttgttcaggagaaattacttacagaggcaaaattgttctgatgcaacatcatacaaagggcagtacttttgtcttctgttttattttgagagaaaggaaagaaaaggcagaaatttgcctgagagccattaaaatagacatcatgttatcaggtattttttccccataaggcttttactaagtactatttcttggaggtcagcacagcttaaacatggaataaaaatagttggactaataaatgttttcttctgtctcgttttctggaaatatagggcaaaatctcaggtggaggggtacagggaactcttggggagaaaaaaagaaaaggtcacacaaagtagaagaacagtgtcattaacccactgtcctcaaaactacttctcactcaatctgtcttcagaattgccaagagttaccaggcatctcctgatctgcggctgacctggctccagaacatggcagagaaacacaccaagaagaagtgctacacggaggctgccatgtgcctggtgcacgccgctgcgttagtggctgagtatctgagcatgctggaggaccacagctacctgcccgtgggcagtgtcagcttccaggtagggtgtgtgcagcttttcccttagagcagtggttctcaactggggcgattttgtcccccagccccagggacatttggcaatgtctagatacatttttggttatcacaactgggatgggtgagtaggtgctactggcatctgactggtagaagccaggatgctgtgaaacattctgcaataggagagctcccctgacaaagaattgtctggccccaaatgtctgtagtgctaaggttgaaaaattccaagttcatacattacatttgcttcttctaattgctttcccatcgtcgttgggttttttttaaattactgtttacaataatggcacctagccattattaatagcactttaggagacatttgcaaacactttcacatgcatggcttcatttgaacctccccgtaaagctgtgaggcaggtaggtagggaaggcggttattattcccacttcgcggatgagagaactgagagagcaagttttctaaggtcacttaaactctttttcaaagacttgtagttgacacagtatactgacattgtgaaagtttggaaaacattggataaatgattttcctcctggcccattcatttgattccactcttcaactttataggggcccactctccaatccaaaaatcaagaaagaatcaaattgacctgagaagggagacaaaaggctgaatcagtaccttcttaggataagctgaaaattacccacatttggcaaagggaaattgtctgccagacctaaaagctggctcggatggggatgctcagtggccacttaaagtgttcttactgaatagtttaatagtctttagagagagagaaaataaaaaagcacaatgttgggtactttttttgtaagagacatagtttgtagagatgaccatccctgaaaccatgaacaatatagctacagtaatagagtgtttttcaagccagactcacgaagtcatttacaagggtttgtattattcttgtttgaatttacatggctgattttatgaaaagctttgttcttgttattgttcttcaacacaattttgtgatgttgtatgaaccagaaagaaagaacaattcaaagtagcttccccaggcttagagaataagtcactgaaactatgctggtgcagccaagagcttctggttttccagaacacagcaaagctgggtattgcctcctatgaataactcctcctttcttatggtcctcaagaacaaaaatagtcattctgtgatttcatgcttggcaaatgaattttcttcttaattcagaaatgtttgttataaaagctgataattaaatctcatccaaaagcataaaaataacacctgatttcaaatcacatagaagtgtacaagaaagttataaaagttattttagatgtatttgcttcttttctcaaatttattttgaccatgtgatactatcaaaaataaatattatagtactactctttcaattcccaggaaattgtaaggtttagcacttcatattgtttcatttactaaattattttatacttcttttattccttttcccatgactatattttattttatatttatcacttaaatatcaattgcatttcattattgacttttatatttagtaagccttactgttctaattttacctagaattcagttgatttgctaataatgacatgccaaagtgaatcattattacacaatcaacagaaatattccacattattccgacatgggggcatacagctctatctgttcacatatatttatccattgattccttcttttagagaatatttattgaatacttattctgtcctcatgaacgttacattctaaccagagagacgtaatataactaattattccaatctttgttcagttataattatgagaaatactgttataaagaggcacaagatattgtgagcatttatggtccaggccctgtgggtcagggaagggtgaagaaggtgaaaaggaaggcagaagaaactgaagtgtgagggcttcttgatgtagaggaggcaatgagttaggtgttgtcagctacagaagagaagccaaattatattaatgtgtatgagtgaattcttacttctctcaaatgggacataccaaatcaatttggaaatgtagctggcaagtgaaaggacacccaacccagactgacagaaggtaaaaatggaatttatcagcccgtctgaggaatgtgagcctggagtagcacctgccatactggacctaggggcccaaacaatgtcagcagagctcactgtcatcaccacttcccatctctgccatctgttgtgtcagcttcattcttcacaggcttcccacaccacagtttaggtttacatctctaggttcaagtctaggagagaagagagatgcctcctttctagcagttgcagagaaagcctcagtgcatcttactgatcctgtctgaacatctgatcctgtgctcatccctgaaccagccatactggccagagaaatggagtgctctgatttactgaccccgggtcatgggtccacacctggaattatgggtgatttcttcccctaaatcaggatgccttactttatagaaggaggaaagaattctagacagcattaacaacagatgtccagtgttgattttgcaaatgctctgtgctttaattttcaaccttgttctgctccaatgaaatagagcttttggaaaagatttataaactagagataaataaatatgtgcaaggaaaataactttgaggtcactgaattccaggaaactgagatcactgaaattctgtgtcccagagtgcaatatttatttcacaactgtagatacggacacattcttagatactgctgttacttgtacctccctgatcctgaagccaagaaagtctgcagaatccttttcctctgactacagctaatgaggctacatagcttcaaatctgttcctctaatgtggaaaattgcatacattctaatagtattagtatcttgggttattaaatgctttcaactgaatttcttggatcttctgttgtcacagaaacatcataatacatagggcaggtttggaagaaagactggccacaaaggctttgagagcctcctcctatattcctaaaactacgttacagtattgcatgtgaagagatagggctatctatgacaactatgtcctgactgattgctaaggttgattcacatgatcttgctaaccaggccagaaggcagacagcttttagttcacaagccaactctgatcagttagtagtggctgactggagaactatgcttaagaatttcgagactatgtccaagctctggggaaaaagtgctacagttgattagttatgcctgccatgattacagcaataggaaggagtggcatgtgtgccacctgtttgtaatccctaaactgggaaggtttcccatttcttctgtttttcatatgcatttcttccatagctgtgagctaggaagaaaatgattcttgacctgtcacatattcactgccagggccagtgctagggtgaagaggcactcaccctcagggtcgagcgggtacaagatcagtacttccatggccctaaaagcgagtacctctctaaattttgtcttgggtttctcatttggttcaccccaaccatggtctctgcatgctctgctagaggctctaaacgcaatagtttatgtaaaggaaacaaatgcatggaaacaaaatgttcaggaagaacaaaaacacacacacagtaactgctgcaatgccatgaaaacttccttaatgaagacagcctcgcttgctgttgtcgtatgtcatggctgtttatctgagtcaactccagagtagcaacatacttcagaaaaacaccactgtaagtcagaggtccactcggtgaaacagggagcctagttaatgttaattgggtctttgccttttgaaaaccaggacaccagccctatgtcccttagggttgtttcactaaagtaactcagctgttgtgacattgaggtaagtgtcctttatacaaaatctcctaatggttaaaaagaaaaacgtgaggtttgaagaccagttgctcagtgcgcctcttctaaatgaatggcagacagatactctcggggtagaattacagacctagtttagtcacggtcttggtaaggatctgcacaccagcttcctcgtttccccattcggggttcctgtggtctcttactagtctggtcgccctgttctccaggcttatactgtggtctctttcagaatatttcttccaatgtgctggaggagtctgtggtctctgaggacaccctgtcacctgacgaggatggggtgtgcgcaggccagtacttcaccgagagtggcctggtaggcctcctggagcaggccgcggagctcttcagcacggtcagtgcccagagggcatcccggggcctggcctcccatactccagctggacttggggtgctgggaacacctggtcttaatggcccagtcagccccacttcccgaggacacgtgccagggtgtgcggggcaggggatgggcccggggaggactttgatgtatgcaaattgcatgagcttcccaagggagctgagataacctttcatcacagtgccgatctgagcttcactgtatgctcattggttgggcagcagtttcacagtattatttctatttaataggggtggaactaagccacagagaggtgaaatggcctgcccagggttacacaataaatgatgaggcatgttttcactccctcgtttttcctctcagagagaaaaaaattagggaggaaccactgggaggagagaggaggaatacacagacagtgtcttccctcctagccactgtgcagtctgaaggaccatcacagaccaggaccagcttacagaaatgtgggcacagaaaccactgagactcctctggttaacgtaatctggatctaaacactcctagtatatatactagaaaaatatatagagagatgaagtcattgagattcagggcaaagaggaaacactcttgtctattttcttttctttttttgagacagagtctagctctgtcgcccaggctggaatgcagtggtgcaatcatggctcactgcagcctctacctccagggttcaagcaactctcctgcctcagcctcatgagtagctgggattacaggtgtgcaccaccacactcggccaattttttgtatttttagaggagacaggatttcaccctgttggccaggctggtctcaaactcctggcctcaagtgatctgcccatcttggcctcccaaagtgctggaactacaggtgtgagccaccacgcccaacttgttttcattttaataatctccctcctcctttacattttaagccaagaaagtattcagtactttactatatttagctgacccaattttgttttcatctatactatactcatccttattttccagtttttatttccaagtttcctctctacaattttatttattttaattattgttttaactgtcttctctctattcttgctttccttttcaagattcagaaaatgtctaatatactctcatttttcctcaaactcaacaaaatgaattagaatcctactaactctttggaggcatacatttagcatctggctagaggaggacctctgatgaaatttaaatatactaaaactgcctttctgaattgctgttagtccctgctaccaaacttctctcctgttttttcttttcgttttgttttgtttttgtttttgtttttgaggcagcgtcttgccttgtcacccaggctggagtgcagtgatgcagccttggctcactacagccttgacctcctgggctcagcctcccacctcaaccgcccaagtagctgaggctacaggagcatgctaccacacctggctgattttttaatttttttgcagagatggggtctccctatggtgtctaggatgatctgaacttctgggttcaagtgatcctcctgcctcagcctcccaaagtgctgggattacaggcatgagccactgcactcagccagtatttttttttcccccgaaagctcttctccttacttatcgccatacaggactacttagcgaggtgtctagttcagtttgaaggctaccactgtcccaaaagtgctcagataccccttcttgccctgtgaaatactgtgatacaacaataaattcactctccagcacattgtttggacaatgacctctggttgctcttcttaagtttccagtggattaaattctctctgatgctcttctcctctttccaagggaggcttatatgagacagttaatgaggtctacaagctggtcatccccatcctagaagcgcatcgagaattccggaagctgacactcactcacagcaagctgcagagagccttcgacagcatcgttaacaaggtagccggggagcctggctggcaggtcttgttacctggtggcaggcgaccctgtcctacagatgcttagccatccttcctctccagggagtgatttatctttagcacattgcttttgctctcacctgtcaaacagaaaagggctgaaattcttctaacagaggaccaaaattccatatgtgaaaacatacagcttaaattactttataaccaggaaatgtgagaaatttttaagtgtaattaaaagaagtcccagaaatctttcatgggattccttttgttgttatttctgaagtttattccataagcattaaatttttttaaggagtaatttctgtttacatcagccataggagtaaaatgctttgttaacacaatgagagacccctgccctttgcaactcagtggctcctcaggatgacataactaaggagagctttttatattttgttcctcaggatcataagagaatgtttggaacctacttccgagttggtttctttggatccaaatttggggatttggatgaacaggagtttgtctacaaagagcctgcaattaccaagcttcctgagatctcacatagactagaggtaagaaaagtgattctgtgcgcctgacctggtacactttacaaaaacaagttagagtgggtcatcaccaaaaataaacaaataaagagttatggattcatcattgatctctacataaagttttcccctttgcatttataaaaggcaaagtagaaaggtattaggtgagatcatgaggtgatgtaatattttgatagtttttccctaatactctgtgtatgcttttcacagtttggaattttatatggtgaatatttattttgaagtctgtgcaaaattcaatcaaggtcatgtgctttcttatcaccctttccaaatattagtagtttatactagtagatagagagtagtagagtttttcaacatgaagtttagcatcttgactttgaagtaatctagccaaatgactgaatcacccctagataatggtgaggccatcctttaggtatcactggatggcacctggggtccttctgatgtggagctactcagctgtggccagcccggctccaacctgccagtgagtgacatttggtccataatacaacagaaaagtgtagcatgttgttagaagcaaagctgaaagcatggagaaaaagagaaacagcctagagaaaggtcaggacaaaagaaacacaggttataagggccaaacactaagaactcagtcaaaggtgcctccccgatgggatttggatgaacaggaatttgtttacaaagagcctgcaattaccaagcaggactggggtcctttgaactgctcacaattaaccaaagattcactccttaggctttcattgctttgaatttgtgccctcctatgagtgtaaaacttaaaacatttgtgttgcctaatggcttcgtacactctccatccatgccaaaaaagacaagagggtttatccttacttgactcaaagaagccattgcccagggtggctgggtgagttgccccaaaattgtttagcacatgagaaaaagagctagcaattgaccccagtccacttggttccctatattgtttcccctacttagaattagaggtatatattttatcttcttgtgcactgtgatttgccacaatatgggaaggctggtgacttccaagttcccagggtacagaaggcgagaagtaaagagtgtgataccccaggagatacctcagcaaatataatgatgttagctgaattagaggccaagcatacatcttatagggaagcatataccagttgacagtgctatttttatttttgtcttaggaaatgctgaactttgctcattagctcagaggaactctcaataatcagtgaacatcattctaccttgcacttgctccaaacttatttcacttccaagaagacaaagagttgcattatgttaaaataacctttataaactgttggttcttcttacctaggcattttatggtcaatgttttggtgcagaatttgtggaagtgattaaagactccactcctgtggacaaaaccaagttggatcctaacaaggtatacaaaaatttacaaaaactaaccatcaagctctaaatcccttcgttctctacccaagaatacctaatgatctcatctatctggactctccaagtcacttaaatgcagtcaaaccttttcgtctagagttcaactactaattggtcagatcttaaagaaaatatagtcaaaggcaggaatcataataggagctaccacttattaagcaccaactgtgtacctggaactgcattaggccctctacatacatcattttatttcatcctgcaacgacccctggaagtagattttgtcattcctattttagagatgagaaaactgagacatggaagagtcaagcaagtttcaaggtcatgcaagcagcagagccagtactcagacttgaggtctgttgcttctgaacccctactcttcagcactgctctttactgcctttttataaaacctttaaactctccatttcaaactcgacaacacttagtggcttccttctttaggctgcaagtattccttccatccaagtccgggatcactgtgctgttgggggaatggtaaaaacggcttgggtttgggtttcctcactttcacaagagggtatgttccatttcaccccaaaatgggtgtacagttctgatgctaacacgtggaggtggtatcagctcccacagggtaaaggctcagtcctcctcaagactgccctgacttcagatgccagcttcaagagggacccccaggccagccacgcttctgatcagccagctacaaatttgggagtttctataacctgttagcttgaaaataggagaaaacaaagcaaataataataataataataataataataatttgggagtttctatgatacctgttagattaaataattcactacaatgactcacagaattccaaaaagtactctggttactatcagagtattatgataaagggtgaacatctttttgtgcctttatttatggcttcctggctcatcagtgtgttctccaaccaggaagctccgccaagtctcagtgtccagagattttgttggggtttcattatgtaggcaaattgaatacagtctccagcccctctcctgtctccagaggtcatccagttcctaccctgtaatcacagaattggtctttttggtggccacttggcatcctgaagctatccaggggcccagcatgagtcacctcattagcatcacaaagacacccatcactgaggaaattctaagtgtttctaaagctctgtgctaggaaatggagacaaagaccagacatattctttattataccacaagctgatgctgcccactcagcccaactcacatgtccatgaatgagctttctaagttactggaaatagtgcaagtgcaaggtatcattaagggccctgggacagaggaccattcaccatctagcaaacctataaaatgaaaggtccaaactcccagttccatcttccaggatatgaagaagataatggaagaggggaagaattggccaaattgaagagtttgtttttctacatttttcagaatgctttctcacttaagacacattccctagcctcggcttgaaagcagtggctgtggtaagagtttaactaatcttcagacacacatgtctgggagatggagttggccgtgtgcccacagtgatctgtacatagcacaagctgtgtaaaatgtgacctccctcagccaaggtgcccttttcccctcttttaaaattcccagggtaggttgtgagagtttggaatgagagtctgaacccagagttacaaccagatttcattatactaagtcgtgatttacagtctgaggtcagtgaccccactcatccctttcagtgggtgagtgtcccagcatctgaactcatggtcactttttttcctaagagattgtcgtctttaatgagtacttattcgctctgtgtttgagggtggaggtgatgtgagtgtgtgtttaaatgaggcctaggcagtaaaattcagttttggtgtttagttctatgagttttgacaaacacatgtgactaccttcataaccaagatatagaacagatccaccactccaaaatacttcccgtgcccattggtagtccatgttgcaatagttccttcctttccgttgctgagtagtattctgttgtgtgactacctcaccatttgcttgttaattccccactggagtgacatttgggttgtttctagtctttgttatgaataaagttgctggagacatttgtgtacaggtttttgtatggacataagctttcatttctctcctgtacacacataggagtggggttgctgggtccaatggtagtgcagtttaactgcataagagaccgccagcttcttctgcaaagtagctgtgcattttgcattcccaccctctgtgtatgacagctctagctgatctccatccttgccagcacttgatattgttagttttctttagttcggccattcatgcttcctcataactgtgaggtagtcattgtcattctgtaaaggaaagtttgtctctttggaatagcagtttgcaaactctcataccaaggcttccactgtggatcagtttgctctgctaggaaggtgcggccggtggccctcactctccccacaggcacattcccctctccctccttgcagccccttctgtccttgggggtggagaggaggaacttctgctggccacattctcccctgcatctgtagcttttctgcactgggcagggcggtgccggcacgccgtgttcctgcatgcccctccattgcgtcagggatggccgtttgcagaatagctcatcttctccctccgtgccttttcccccttaggcctacatacagatcacttttgtggagccctactttgatgagtatgagatgaaagacagggtcacatactttgagaagaatttcaacctccggaggttcatgtacaccaccccgttcaccctggaggggcggcctcggggagagctgcatgagcagtacagaaggaacacagtcctgaccactatgcacgccttcccctacatcaagaccaggatcagcgtcatccagaaggaggaggtaatgcacccaagggattggccaccactggatgagtgggctgggtggcctcccaggaggacccacaaacctctttcacagtggattggactgaaaacaaggagggatgcacttgaaatatgattatatggttgtcctttcactctcatagtgccagaaaatcccatttaggcagctacatattttatagcactattgtatattaaatatttaatattttaaagttatatctttagtataagtgtgtttatgtatttaattataatatttaatatatatttcaattataaacttgtacaacagatatatttaccttttaaatattttatataaaatttttctatatttcaaagcttagaggtgattcaagcatagtcgtgctgttaattattggagacgggacctgcacgtgggcagccccagtgaggcggtggtgtgctgtgggaaagggccgtgtaaggtagacaagttcactgactagcttctagtcctagcttcctcctgtgattttaaacaagctacgtaccttcagtttcttcatctatgcattagcaggaaagacctctaagtacagtacaagattatactcattttattaataaaaggactggtcaagaaggtctctcaaaccacagaattgttcaaaattctacacaccataaacaacttattattctttaaaacacatatatatacacttatttgtcgtcctttttatgcagggccacagacttctctgtgactgtgggtttgctgatcacaattcagcattttcttttataaaccacacccgtagtgctttgtccatgattttcagttttgctttgtgtaagcagagtgagagcttaaagatccttgttaaacaatttgagagcagaagccttctggatgtttatgatgtttttctccccgagactttgacagcagtcttgtgcacacctaatatgacaggaatttttatagcaactcactttcataatatcttgtccaaccatttggcttggttttcatagaaagaaatctttttctttccacacccatggttcatcagtttctccattatctaattagattgggtcattaaaataacaagtataacaggcataatcaagttggtgaacaaacacagatgaattgtggtgaatatatacctcatcaggcagaagcagaaatagctgagctaactggagagtcatccagcaggtagtgttcagctgggtaaccacatcagggtgtggctttcacagaagctgaagaaagcctgaagcagtgactcagtcgggaggaggtgggtttagaagccatctgctgtacttcctatacttcttggtttggacttttgaacactgagacattctaggcataacacagatataaactcatggtgcccaaaagcatttcaaaaccttttcttttcttcattcctgccttcctttcctttccttcctttcctttcgttcttcctttttttctgtgtctctgtctctctttctctctttttcatttttgagacaggatcttcctctgttgccctagagtgcagtggcatgaacatggctcactgcagcctcgacctcctgggctcgagcaattttcctacctcagcctcctgtgtagctgggactacaggcttgtgccaccatgcccagctaattaaaaatacagagagatatatattttgtaagagacaggggtcttactttgttgcccagtctggtctcaaactgttggcctcaaacgatcctcctacctcagcctcccaaggtgctgggattacaagtgtgagccactgcaccagcctgaagttttcttggccttccttcgttccccaacaacctcaacaacagttctcagctgtttgctagggctgtagaacaaagttccatagactgggtggcttaaacaactgaaatttactgtctgcacaattctagaggctagaagtttgaaatcaaggtgccagcactgttggtgccttctgagggctgtgaggaaagggtctgttccaggcctctctccctgacctgtggacagccctcttctccctgtgtctcttcacatcatcttccctctgtgttcgtgtccagatttcctcttctcgtaaggacaccagtcatattggactagggcttaccctgctggcctcattttaacttgattgcctctgtaaagaccctatctccaaagaaggtcacattctgaggtactgaaggttaggacttcgacatatacattttgggggaacacaattcaacctataaaattcagaaaagactctaccccaaaccagcagaacttagcaaatagattgattgacccttaaaagaattccatttactggaaattcaccctcagttggagaaggcacaggtgatatcaaaagcctgtgttatgatgggggagaaaatcttgagtgctgtgcttctactacagctttctgcattgtaagttgagtaacatgaggctgtgtgcggtggctcttgcctgtaatcccagcactttgggaggccgaggcagggggattgcctaaggttgggagtttgagaccagcctggccaacatagagaaaccgcatctctactaaaaatacaaaattatctgggtgtggtggtgcatgcctgtaatcccagctacttgggaggctgaggcaggagaattgcttgaacccgggaggcggagattgcagtgagccaagatcatgccattgcactccagcctagacaacaagagcaaaactccatctcaaataaataaataaataaataagtaagttgagtaacttgctcagtaataggaaaaggcacctgacagggtagaaaaaacatggactttgaagatagacatacttgtgatcgaattatgacctcctcccttactacctgtggcattctgtggaacttaaccttacaaatccccctttgactgtaaaatggagagtataaagaggttgttgagaggaataaatgctaaatgtatgtaaagttcctggaacataaggaatcaagaaatgttaggcccatctttctttttaacctgttaagagtattttaaattactctgaaagtctttccctagctgcctcttcaaattcaggtggcctctctgtcatagctccaggcttgtccatagcttatgagaccagacagtgacttccctatgtttacgtctcatgttcagtttgttttgacaccgattgaagttgccattgaagacatgaagaagaagaccctgcagttagcagttgccattaaccaggagccgcctgatgcaaagatgcttcagatggtgctgcaaggctctgtgggagctactgtaaatcaggtaagcaaaaccagaggtggcagctcctctggttcttattatttaggttgtcattatacgtctgcacccttcttccttggggttgatgaggactttgatccatagacaaacacagaaatgttcctacacttaacctgaacacctgtaaggtttagaagacttttaggaaacctcttccctttcatgtaacaaccccaggtaaaaaagaaatcctagagatgagtggaccaggctttaaggagtaccactttctcagaggagtctccacttcggggccagacctgacaatatgatgcaaatctggagtcatgttgaagaatgcttagtcatgaccaattcacgcagagtaattgcagggcttgagactcacctacaaatgcctataggagagaaggaaaaggatctagaacatccaactcttggctcagtcagcagatgaacccagcatgccaaggaccttgacaaccaggaatgacctgggacctgacttcttaggctacttcagacaagactagatcttcctatcagacttcttagaacgctgactcccaagttcagcatggtgctcaagcagtctcagatgaagggaggtaccagcctaatacctctgtccagtgggcctccttaattcaaatctagatctgttcttgtccacacttccacggcagttattcagtgagcatcatgagtcttttctcattcagcgtaattggatttccccacaaaagttctgagtgtacttgacatcaagggagcagaaacagagaagagaaatgcctattacattcccaagatcaggaaaaaaaaatgaggaaacgtttgcctttgtaagtgccaatcctttgataaaatggaagactttccaagcccacaaccatggtctatctgtacacgatggatatctctgactcaatccagcagttatgcaaaatgatgtttgccatgaaggcaactagataagtgaacaaaaatgaatagatcaaggcaatcctgatttttagaaaagcaactcaaagcacataccatttgatgtagttgtattacacttatatatgaatgaaaatctattattagtagtatttgattgataaaataatattcggcgccaggctcagtggctcatgcctataatcccagcactgtgggaggccgaggtgggtgaatcacttgaggtcaggagtttcagaccagcctggccaacatggtgaaaccccatctctgctaaaaatacaaaaattagccagtgtggtggcaggcgcttgtagtcccagtacttgggaggctgaggcaggagaatcccttgaacccgggaggtggaggttgtagtgagctgagattatgccactgcgctccagcctgagtgacagagtaagactctgtctcaaaaacaacaataaaaaagaaaataaatttgggctgtgtatggtgcgcacgcctgtaatcccagcaatttgggaggctgaggtgggtggatcccttgaggccaggagttcaagaccagcctgggcaatgtggcaaaatcccatcactacaaaaaaatacaaaaatagccaggtatagtggcacacacctgtagtctcagctacttgggaggctgacatgggaggatcacttgagcctgggaagtggaggctgcagtgagcagagatcatgccactgctctctagcctgggtgatagagcgagaccctgtctaaaaaacaaaaacaaaacacacacacacagggaaaatacatttatacttctgagtgttcctctaaaacttcagattcctcctaagaaatcaaaatttcctgagatgtccaagaccttccttatttttttttgtttatttcaaaccaactacaaaattaaatgttcaaactaagaagtcactccaatattttctcccaagcaatttaatttccttcatatatgtatgaatatattcatatatatgtgtgtgtatatatatatacatatatatgcatatacatatacatatgcatatacatatatatgtatgtgtatatatatatgtgtgtgtgtgtatatatatatatatatatatatttttttttttttttttttttttttcccaccagggaccactggaagtagcccaagtgtttttggctgaaattcctgctgatccaaaactctatcgacatcacaacaagttgaggttatgctttaaggaattcatcatgaggtaagaaggaaaatggctgggaatttcagtagagcagtggttctcaaagtgcaatcttagaccagcagcttcagcatcacctgagaacttgctagaaagacaaagtctcaggcaccctccagacctgctgaattggaatctctggaggtgtggctcagcaatgtgcagtttaacccgccctccaggtgatcctgatgcacactgaagtttgaggaccactgcagcagagcaacactacttgaactactaatgagtaactaacacgtcaactatgaaacgcttttgtggctagcatcccgtgtgcctcacaatcacttgttgtaaaacaagtatcatcatcttcctcattttacaaaagaggaatcagaggttcagagagaggagataattttacttaaggtcacacagacagttggcagcagagatgagctcaaaccaggtcttctgaatccaaatagtccacatgtccatcaatgtgctgatattccactgatgcactagagtcccagaggttctttgcattggcagtcattgtaatgttacaaatcttataatatcttatttttagaaacttaaaaacatacactgcctcaaattgagagaggcaagttctaaaaccaggcttttcaaaggtattatcctgtgacagttccccatgtcagacaagtctcatctctgttccttaattctgcagtggagctggcttcaagagcagtcagttaggaactgggtctttggtcaaagccttgtaatttattgcaatacagacagatatattgggtctcctatggtcctaaaaatatgagtatgaaggatgtgatggcatttcacctataagagaaaaggacttcagaaaaatgtgtagcaatatttctttctattcaaaaccttagagaagaatattaagtataagaatatcttcacttggcagatggggataaaggagactaaaagtttgctaaattcagtgaaaactcatcaaaatgctagcatttgtgaggttagagatatctcctccttcacaggcttttgcgagaggtccgcaattttgctgcatatacaggagacacactgtgccctgcagtgaatcacagccgcttggtaataggatgtttgtgtggctttgcgtgtttgtatttgtgcatgtgtgtgaacatactcacagattatcttgattaatgttttgatatttgaattgtttcctgtatttgacaacaattctgacagaaaaactagttgttgttgttgttttttcagtacataatacgtatcttttaaaaggctagaaaaatatttggggaattattttattattttattttattttgagacaaggtctcactctgttgcccaggctggagtacagtggcataatctcagctcactgcaacctccacttcccaggctcaagagattctcctccctgagcctcccaagtagctgggactacagacgtgtgccaccacatctggctaatttttgtatttttggtagaaatggggtttcaccatgttggccaggctgatcttgaactcctgacctcaaatgatccacctgccttggtctcccaaagtgctgggattacaggcatataccaccgtgcccggccctattttttattttttgtggagacagggtctcactatgccgtctaggctggtcttgaattcctgggctcagagattgggggcttaaaaaaattttttttcatatatttttatttaaaattcattatggttgaatgcttccaaagttgactatgccccaggacctctaaaaggacctatgaaatgtttgaagagcactcactatattccaggcatgatattagttatgggactacagagatctggcttgttcctctgttcttaatgacaggacatagccctgcatggctgaataatagaatgcagcatatgcacagaactttaagaatgactaactacaggactataaagatcagaaaagagaaatcagtttcaggctggagcatttgtgggaggcgttatggaaaaacaccacttaaatcttgtcttgactatatacgtggaagaaaggcgctagtggggaagagggagccaggacagtggccctgcctgatccaaggtatcactttcagctgctttagttacccatggtttgaaagtattacttacaatatgatattcagagagagagagagagaccacattcacataacttttatttcagtatattgctgtaattgttgttaatctcttactctatctaatttgtaaattaagctttatcataggtatgtatgtataggaaaaaaacataatatatgtagggttcggtaccatccgcagtttcaggcatcccctgggggtcttggaacctatccccgagaatgaggaggactgagtaccactgagtggaccagcaggaccacgagactctgtcaggaatgcctgtgatgcaccgggttcctctaagtccagctggagcagcgtgttctcatgagcatgctaggacaaggaggaaagattggaaatatgataatatcagtaaatgaggctctgaatacaatttaaatgtttaagaaaacttgtcaggagagtgattttcatttacttcagtttgcctcaattttttctactagttataaatcttgcaatccagtatctcacgggtatgatcctttccatgacaccacctaggtaaaatgtacttacaaaatccctactaaacatgcgtttctcattagctcccagccccaggaaaagttactccaaaaagaaccagtgcccagtaaaactagtcccaggcaagagatacaagaggaaatggactttcctaggggtcgctcctttaacaaagtcattagagtttcaataatgaggctatcattctccccagatggcctacagaaatgttggattttcaaaatcaaattcaccattttaaagttgttctcctacccttttaatggtgattccacatgggaaccagtcccacctttctccccactggctgggctgctgcattgttctaggaggccaggagactgtccatgcttcccagacttcactgttcttacacgtcacctgaggatttgtcaaaatgcagattttggcctgatgcagtggctccgcctctaatcccagcactttgggaggctgaggtggaaggactgcttgagcccaggagttcaggaccagcctgggcaacatggcgaaactctgtctctttaaaaaaatacaaaaaaatacaaaaatttagccaagcgtggtagtggtgtgtgcctgtagtcccagctactcgagaggctgaggtgcgaggatagcttgagcccgaggaggtcaaggctgcaatgagccatgatcgtgccactgcactccagcctgggtgacagagaaagaccctgtctcaaaaaaagaaaaagaaaaatgcagattctgattcagtaggtctggggttggtcctgaagcactgcatttctaacaggcccccaggtgatgctgctgctgctacactggaccaaactttgagtggagagcctgcaaagattgcttaatttcctccctttcacatttctccctattacctctccctccttccctgagggcttaatctcttaggccatccttatcatcatttaccacttttgccgtctgcttcctcccaaaaaataaataaataaataaataataaaataaaattttaatggcaaaaaaagaagttgtaaatctcaataaaattatgtgagaacaaaaaaaaaagcaaacatgctcaaactgctgcaccttgaaccaactatagacgtcagttcatccattcattcagcagttattgagctcctactttgtgccaggcactgtgctacatatgtggaaggatgaagtcccaatatcagtaggacaaggctacagacaaaacagtactgctgctcattattcatctctatgtgcaaacacaacagatggcctgccctccacttcattctacagagatcagaagtcgtgggtgagagtgtgctgatggtgcacaactgtgtaaattactaaaactcatcaaactctaaacataaaatgggtgaatgttacggtatgtaaatcataccctgaatacagatagtagatgaggttcctctgttgcttaattgcttctcaagtccaatctggaagttacagcttttaatgaatagagtaactattttttcacgttgtttgtgctgtgtattttctcctccactctgctaacagacagcagaggtgacgcagaagtggaaaatatttggggcttgaacagctctcaggtttcccctttagtaagctccagcttctcagcagacttgggctgtagatcgataagcccagatttccaaggtgaccataaatgagtctctgttgctgagagctaatagcggaaacatttgcttgccaggtccactgcgtctagtgccaccacggggcagcgacctttctgactcagctgtagtggaagcagaaacagccataaagaatcctggcagcctgatttgctgcagccagtactcatccagccagtcctgcaactcttcaaactgttaccaagctgggacctcaatcagcttctgtcttttcctgcaataataaaaaacatctcgggttcagaagccaagacaagaagatagagagatacaatcttctatcttcctcttctgctcccccaaacaccccgaccatttagatttttaaattttcttctttatacttatctggactttctcattcttataaagactaagtgatgttaaatttgtttttaatttaaataaaagatagtagtactcactggcaccagttacagcttgcctttaagagaagtagtttcagatacaccctgaaagggttctgcagcatatatgtggtcataggctcagaaaacaggctgttgagtggtggcgtttttaaactggagttggggtctatgaagaggaaggagaaggaatttgtccgagtagccaaaggacaaccaaatgtgtagagtgtaggtggaaaaagaagcagtagttttaacttgagaccaaggccatatgcctggcttatagctggaaatggggaaatggctttcctaggcagtatatgtggcgttggggttgggaatatgggcactcaagccagattgcctgagttcagatcccattctgcctcaactagatgtgtgaccctgagaagttacctaccctcggtttccccagatgtaaaatcggaataataattgtacctctcccttgcagttagtgacagaataaaatgagttaatacatggaacttagaataagacttcatacatactaagggatcagtaagtgtaacattgttcagtggggcaaataggggactgatggatttgagtgggaaatagagaattaatctgacttaaatacggagattgtctatccatgatttgtctgtctctataaagtttgaatcataagacacagtgatgctgatgagacattggcctgggagcagcaggattctgggtttatatccagctgtgctgtcccacaggtatgtgactggacagggcacttcacctctttgcatgttagtttcatcaactatgaaataaagagactagaatacagcatctctaatagtttatcattctcatattgtacaaatagttcatttacttagcctgggtctgtcaggcataataacgctaccatgtgctctggcttcagctgtgtgcagggactcttctgaacatttgatatgtttcaactaatttaatctttacattaatttatgaggtaggctcttatcacccacacatcacagatgaagaaactatgacatgaagaggttaagtagcttgtttaaggttgcaaagccagtaagcagcaaagcgggattcagagttgagcactctggctccagagtccatcctcttaattgccatgctgagctgttccctctagtgactatattcagttgctagtaacagaaggaagagtagcttaaataagaaatttatttttctctcacattaaataagattggaggtagtcgatgtagagctgtgtagtggcctcataaagtcatcagagaccctggttcttttccaatcctttgccatgccatcctggttctagtgtacccattctcgtggtcatgatatggttgctagggctccagccatcatgaccacatctaggcaagtcaggagtagaaatgaggaaacagcaaaaagatgtgcccatttcccagtgccttcacctatattatcagcgatccctacctgcatgggaggctaggaagtgtaagttttcaggtggtcacactgcctggagttctgccagtagggaagaaagaatggatattgagaaaacaactaacgaatgtttgtctgccacactgaggaacccatgtatgggctgtgctgaaaaaggggggccaaggctgggtacagtggctacgcctgtaatcccagtactttgggaggctgaggtgggcggatcacttgagctcacaagttcgagaccagcctgggcaacatggcaaaacctcgtctttacaaaaaatacaaaaaaaattaaccgggtgtagtggcgtgcctgtagttccaactgctcgggaagctgaggtgggaggatcacttgagcccaggaggcagaggttgcagtgagctgagatcatgccactgccttccaccctgcatgacagaatgagatcctctctctaaaaatagagggggtaccaagagatgcagggggggtgagggcagcatgactactctctctgtaggagaccttaactctataaatggaggccccaaaatgttactgccatcaaaagccaggaatccttttctggaggcgtaacttcctgccctttctaatccctatcaatctggtttctgtagaactgtgactgctagaaaaccccaggcatatttgttctaagaaaatacttgtgttcggtgaatttaccaacaaagggagcatcagaggatgtgagggaagtctggaatggttgtatcactaagtgagagcagcacagatgtttgtggacctattgagaatgttacagataagaccatttttgaaaagttgtttgcagtgtcattttatgatcttgtgtacattttccaagcgatgtggctattctctaggagggatagtagaaattatttcaattttaatcaaataacctagagaatataacccaaatgactgaaaggaagaaatgtagaaaaagtatataaaataattttttgcattataaaagtttaaagacataaagtaatattactacataaaatctaagttttttactccagctattaatatgtttttctttataaaacatcacatttattaattgctgtgtaacaaactacctcacaatttagtggcttaaaagaaaatttaattattatgcatgtggtacataataatttttgctttcctcatttctactcctgatacttgcctatgatgtggtcatgatggctggggccctagcgaggtgtattgtggccatgagaatggttttgctgcaacttggggttggctgggctcagctaagcagtttttgcctggagtctctcagttgcactgagacagtgactaggacttgaattacctgaatgcttcctcactcatgtctggtgtctgggctgagaatactcaaacagcaggggctcctcctctctctaactctccttctctccacatggtctctcctgcatgacagctttagggtaactagacttgtcacaggatggttcagaactcttatagtacagaacgagagagagacagaggccatattaccttttattagccagtcacacagtaccacctccaccacatcctattcagtgtggctgtcacaaagaaccatccacctcttgatgggggcatgggcaaggttctaggagagcacattcttgtggccattttcagaaatacaatctgctacactccagaagcatctgtttgccttattatcatagcttctgatttaattctcccagcaaccctaggagattatatgagcttattatccccattttccagagaaaattgaagatttttatggttaagtcatcctgctaatgagtagcagcttgtttcaaccgcagttgtctgcatataacacatttaactcagtcaagggcacatggtgagcaatcagaaggtgttagctagctgctgctacttctgcaaacaaagactaaggagagtttagctgattttaccaaagttgtccgagtagacttccccaaattagctgttagctttggcaggactcatcccacctcctgtagcctgccaatgttataaacttgggccttgaagtcatcctgaaactgatcttattttacacatggtggtaattgtaactgttagttaagaagcaataaaaaaataataaggggtgatatagatttctcaggattcaaaggccatatgccttcccttctatttcttccctaaaaccgttaattcataaccttagctatcctataatttgcttcaattaatgacaaacataaaagataggtgaaaatccagttaagggagttctttcagattctgtgtgagttaaatcaagtccttcttctatagcaggctaattccatgatgaagctgtggtgctaagtttatttttgcctaggcaggtagctcttccttgccacatgctatcctcttcctctttgactgtcatcctgaaaatgtgttcagtgttaagaggatttgataacaatgtctgggtatctccataacttagtccaaatctggtaccactgttaggaaaataatgtaagccatattgatcacccacgtcttattcatttgaaggataatatagttattactaattattgcgtgttaggtaacatacagccattattctgtccctttaaggtttattgatttgtaagttcccttgggtagaagagtacaaaacaaaaggcaaaacttcatcatgtttaaataacgtgattttcttctttggtgtgtaccgtaccgtgcaggagacagggaaaacaccaggtttaacggtccacaagccagataaccatgatgagttctaaagattttctctgtctttaatgttcttcagttttgtcatgagaagactggatatagctctgttgttgttcattagaggatttatatctctcttcaactctagaaaattaccagctgttatctctttaaatattgtctccctctcattttccattcccttggagattctattagatgtgggttggatcttccttatatctctatgtttcttaaccaattttttcatatttttttattttttaaatctcattggtgatttccttggatctgtcatacatttacttctccaattatgtctagtctattatttaacctttaacctttccattgagttttttgtcttttagcaactgcatttttttttttttttttttttttttttttggtgagacaaggtctggttctgtcacccaggctggagtgcagtggcatgatcttggctcactgcaacctccacctcccaggctcaagccatcttcccacctcagcttcccaaatagctgggactgcagtcacctgccaccatacccagctaatttttatattttttgtagagatggggttttgccatgttgcccagtctagtctttaacttgtgagctcaggcaatccacccaccttagcttcccaaagtgctgggattacaggcatgaggcaccacacccagcctagtgactgcatttttcttttttctagaagttctgtttggtccttttctgaacttttcctggtctcttttttcattttccctgtttatttgtttttatcatggattttataccttttatttattttctttttttttttctagttacatgattacttaggattttatacattttattacctctctatattaactttggttttttacattgttttattatctctaattcttattggactaattcttttgtttgatgcatctgttagttttccctcgtggtggttggtttcttcatatggtttgtaattttttattgtgagctcatctttggcgagagtggctcatatgccctgattgagaatgtgttcctccagaacaactttatgttggtttggctgaatcctagcaatttcagtaatcttggactggcttttaagttattttctcaccttgaagcacatacagtcaaggaatgtacatttgtaacttatactatgtgtggtgcaagcctagaatttccatttctcaatatgactttcttttccataaatggccctaagctgatagcaagttttcattctgcctctctggacatcttgcagcatttttctaaaccctctttcatagatgggatagcttttcaaggctctggacgatatgcaggtggcatatccagaatctccctttgccctggccaaggccacatcactaatcttgtgtgagctttgaagccccttcccctcagcccatagacctatacacagtcctaaaatcttaatgggcagtcctactgacagctgccttgtcaccagctcctgtgatcattctagctttgatttttctctttctttctggcacctggtgttcccctttctctttcaacaagtttttgctgtgctttcctagcacttccatatgtacgtagcaggaggaggctgaatgccatctgctctgtctgccatgttgctgtaaatcacagtgagttttttgtaagtgtaacagcttccattctgcagtgtgttttgagtctgactcttagatccatcacttcctcacagtgttatcttgggcaagcatcctaacatttctgagtttcagaaacaaaatagagataaatgctgactttttagggttgttgggaaaattaaacagataatgcatgtaaaacttcttgaaacttcttctggcacatagcaagtcagaggttctcaattctggctaggttggcttcagtatcccctgggcaactttttaacattagacatttctgggccagaagcaatggcccacacttgtagtcccagctacccaggaggctgaggtaggaggatcactggggcccaggaggtcgaagtttgccatgagctgtgatcatgccactgcactccagcctgggtgatagagtgagccccgtctcaaaaaataataaaataaggtaaaaaaaaaaaacaaacacagagatttctgggtgctacccctcagcagttatgattcattaagtctgagatagatcccagaaatctgcattttgaaaagctccacaggtgatcccgatatgccacccagtttgaaaacgttcttaaagttattcgaaaaatcgtaagtaatttcattgttctcagatttctaagcacttcaaagtcatttatttctcccacactgatattttcatctcagatgtggtgaagctgtagagaaaaacaagcgtctcatcacggcagaccagagggaatatcagcaggaactcaaaaagaactataacaagctaaaagagaacctcaggccaatgatcgagcggaaaattccagaactgtacaagccaatattcagagttgagagtcaaaagaggtaagaacagggcagaggaggcctcttcctgtgggataaagagcagcgcatggggcctagcaccttggggcatgctctgctgcacttggggagctgcagaacctcgaaagggtggaagagggtcccacagtcagagaggctaccagagtgtgattcattctgcctctgtcctccccatccctgctccttgacctctcccagacaccttggtgttggtcttgtgccagggtattcccagggctgaatgatggcctgtgttggtttttttgtttgtttggttggtttgtatgtttgttttggcacagtgtgaaggggtcgcagacctttcacttattatttgctgagttgtccatgactgatgtccatttctactgggtgatccacccccaaccctttctaaaaggctaactgatcttttcttgcttctgtacgctctctttccctctcctccctctcttttcttaatttcagggactccttccacagatctagtttcaggaaatgtgaaacccagttgtcacagggcagctaagaaaagccatcttcattcgtggagactgtggccctgcaaccctggagaaggacttgctggtacttaaaaaatgggacatttgccacccaggactgactgtacactccctgatcagccagcactctggaagctttgggatcccaggaaccatggaattattcccaaatggactctgaccagatttttgccatactggggggtggcgggatggaggatgggtactcaggcatgactgcgtatttattaaagtgtgtttttccacaatgtaccaaacaaggcataagcagcttctcctgctgactggccaatcactgcccatctgagagatgatttcctctggcccatatttgaatttattggagtaactcaaattgcctgaggaaaaatggaaaaattatccaccagtcgattcaaactgaatttcactctttataggaaggcagggcaaacttgtaggagtacgaaacattttcaataaatctacaaagggaagccttactacaattccaaaaatcatcatggttggaaatttgggaggagattatttgtgaacttgttacccttttggtaatggtggactaattgctgtatagttatttttgttttattattactgttacattaatttaacatgcatttatagaagaatacattcaaagcactgatgtaggagatacacggtacttggagcagtcagccagaaatcacagatactgctttcacttaaatggaaacaattctccgataatgctttgctttttttcttatgtcactcttgtgtactatctatttttctcctctctgggaccaagtttctttttataaagcaataatatctctgttttcatttcagaacattgtgctgtctgtcagcatatgtatatcagctacaaaatatattcaactttgacttcttttgacaaaggactttaggaaaaagaggaacaaagacattatttgagaattaaattatatatttttaatatgactgtgaccttgactgataataaagatgtaataagaattgcaagctaaatgtt

SEQ ID NO: 15558 - DNA, 125753 bp, Homo sapiens
agacgaggtttgcgcttggctgggcatgttccgcggctactctgcggcgcgccaggcccccgctttccgcaccccgcgaccctagaagccaccgaaccgccggcgggccatggccactctgccgagcgcagagcgccgcgcgttcgcgctcaagatcaacaggtaagacgccccccgcggcgcgcaggttgcggccggacagcccagcgctggtgtgaagcggagcttcgctgcaggggccgaggccggacgagtccattcgcgtccgcggcggggcgcgcctgagacctggggcgcccggttcccgaggctgcggcggtggagccgctggacgcgcggcggctcctgcgctgggcccggcgaggtcctccccaagaatctcggtgctcctggatgtcctcagccgccggggatcccttccccgaacaacctcgcccgctccgccctccaggttcttacaggtggccgggtcccagaagggtgataggcgcctgggtaaccgtgttgggcgcgccacggagtgtctcataaacggctccttcctttgaggcaagtctgagcgcggggggaagaagtgaagtggctgaaattagagttgcgtttgaggcaggctgcaagccttctgtcgtcctgagcaaggctccgtcctcgcctgcttcattattccagaaagagcttggctcctggtggcatcgctatttttataccctggtccaaaggagccatgaagtggaaaaagtgattttttaaaaaatctacacttaaataaaccaaaagaaatggcctgtggctgacattttgagatttacagaactccagcaaaaagctaaggactgggggatcccaactcaccatccaattcctaatcaaagttgcacaaactaaatatgtaagcacatttactgctcaaagttctcagtaaaggtgctttaactgcagtttttcctccactaaaaactgctgacaagtaattgggacatttttgtcttgccctgagaaagctagactgtctagttaaaagataataggaaactcattctaaagtgtcaacttattctattgcccacagggctgtccgatttgttaatcttcacttagctgagcctgtgaaaggtggattccaccgtaggttcatctttgtgctgttagtgtgtgaagaggtttgaacaaggaattaaaagcctagaaaaacaaggcgataaggtcttctagagggcatatcgagctttattgacgattttatttccacttgatacgtgactgccagcaaactgtttctcttaccttactatttcgtcatctgtaaaatgagtttaattatttatgtatattgcatattaatgttggaggccaaaaggtactagtcaaaaggcataaagaggctgggtgccatggctcacacctctaatcccagcaatttgggaggcccagatgggaggattacttgagcccagagtttgagaccagcctgggcaacatagtgggacccctgtggctacaaaaaaataattttaaaacattagccaggtgtggttgcatgcacctgtagccccagctattcaagaggctgagacaagagcatcgcttgagcccaggaggatcacagctgtgatcatgccactgcattccagcctgggtgagagagtgaaaccttgtctcaaaaaacagacaaaaaaaaaaaaaaaaaagcaaaaacaaggcatgaagtatatcagggatctccctatgggaatttttttctacattaaggttcatagctgttgcatgccaggaggggtaattcattcaaggagtatagggaatcaaactgaagttactgatgggtgtattatttgctatagctcctgatcctctgtctttgtgaattttagatcaggaagtgtgactggggcagaaagatgttagaaactatggggttgggcagggttgatctggggtgagtggccgagacccggactaatcctacaggcagtcttgcaagcaactgcggggtcggtgtcacctgggggttaagaataaaggccctggttagtgtctgatctgcttgcaaattggctctctgctacaaagtcactgtgcaacattggacatgttacttaacttctctaagctttggtttctttatgtgccaagtagagttgatcatagtacctacttcttatgactgtggggaggattaaatgaataataggtacaaagtccgaattgccaagtgctggatgtgtaacatacacattggaatttagagacagtacagaaaaaataatgcaaaatgtcttgttaatgattttcatgttgattgcatgttgcttgtagtgtctggctcagaataaatggtgaataattcttagttgccatcattaacattacaatcagcttcactgctgtcattatctccatcatcaccatctttgagagcctaagatagaaaggtaggaaggaaagctgaagttggagagcttcaggcagagatcagtttgggttaggtatggagatgccagtggctggctgggagctttcttggggccagtgtttctccgcctgtgccttccatctggtgctgagaacccaaaacacattcaatggaagaaaatatgtgatgaaatctgatcaagaagagccccctcaagtttaataaagtataaaaggttctataatcctcaggcaagaaaatggattggaaattcgtattcttagagttctgttttcctttttgaagcactctgtgtgttgtgtgggagagttatgctaaggagcttggcagaaattattattcaaaggagcagattaataaggacatacctagtattcatatatcatttaatttcaccatttattgtttacttattgtgtcccagacactatattatacagttaatggattttatgattaaattctcacaaaaagcctatcaaactcatgaagtcttgtacagaagaggaaaaggaatcttggagatacagctgcacaaggccatgtaattttttcaagaccatacaaccagcaatggcagagctgggattgcaaactgctccaaagactgtgctcttaattgggccgattgttattttgatgcatatgtatcccaagaatttcctttaaagcaagaggggaattaatttttaaaaaatcatcattttggtagcagcattggcaaagtgttctgtttctgattagtgtttaatatataaacattaacaatgtgatgttttgcaatgttgaaggtggaaaagaaatgttttcccttacgtgcctacctattattttttttaaataggtcaaattccaaaagtaagactgtgttgaaatatggccattagtacattcagcatgtgctcatgtttttcaccttactactcagaatagtgtaaactatctcttaaaaatatttgtgggataaaaccagtgtgcttcctgttaatgaagtattcaaatctgatatattaaaaatattatttgtaaagcgttcagttctgaccacaccagtctccagaaggagtgagcagactatctcacagtctgagaagaaaggtgaaattaattttcttgtaagtgctatatacttgtcttcatttccatttttttgttgctgacttgcgtgccaaggaaagactagatctaagttaggcagttcgtaataacatttgcgtttgggatttcaggtgctgctgcattaaatgtcataacatggtacttgtgggaacatctagtcttgttaattgccttttttcttactggaatttagtgcctttgtagattataaaaattattactagtactctgaaaatttattaaacaaaatcttagtgtctttcaaatacagaatagatgtaaaatttgatcaaatattaaagtaaaataagaaccttggataaagaggacgaaagtgtagaatgcagaaaaaaacattaaccctcttgtggacagtcaggattgaaaggaagaaaaaataatggcttacacttctagaatgctttctatgtggcagagacagttctaaatatttacatatcgtaactcattcacctctatgagataggagcaatgactatctccgttttacagatggagaaactgagtgcagagaagatatagaaattgtccaaactcacaaacaactaattaaggtcacagctgagattcaaatgcaggcagcctggctccagagtcttctcttttaatcattataccatgctgccatctcagttttattttaaaataataataggtaacatttattaattatttactatgtgctacatattgtgctaagaactttatataccttcatttcgtcctttcagaaaaggaacaaacagagctgggtgcactggctcacgcctgtaatctcagcattttgggaggccaaggcgggacgatcacctgaggtcaggagttcaagaccggcctggccaacatggcgaaaccccgtctctactaaaaaatacaaaaattagccaggtgtagtggtgtgcacctgtaatcccagctacttaggaggctgaggtgggataattgcttgaacctgggaggtggaggctacagtgagctgagatgtgccactgcattccagcctgggcgacagagtgacactctgtttcaaaataaaataaaataaaaaataaaaaaggaacaaagtattaggcataataatcatcaccagagagtgattttatgaaagacaaaaacaaggtggcaagaagagagaataaagttacataaagatagcatttaagaacaaccacaggctgggcatggtggctcacacctgtaaccctagcactttgggaggcctaagctggtagatggctcgagcccaggagttcgagaccagcctgggcaacatagcaaaaccctgtctctacaaaaaatacaaaaattagccagctgtggtggcttgcacctgtagtcccagctacttggaaggctgagatgggaggatcactcgaacccaggaagttgaagctgctgtgagcagtgattgcgccactgcactgcagcctgagtgacagagcgagactctatttcaaaaaaaaaggaacaaacccaataattttgggcataacgaccagagcacaatgagctacagagagctttctgagaagtatttgctaattttatctgcaaagataatacaagcataaaaatatatgtattcaaatgtatagatgtgtatctgcagtgagagcagagctgttcctcagtagtgggggtggctggcagagtgaggtagtgtgctttcaggaattgctttatttgtctgatgtgttctagaccaaagaccaacagaggggcttgggcaatcagacacagaatttttggcctttcacatttagaatcggttccttccagattcttggaaaaggtccatttgtgctttaggcatctagtgctattctgaagatgccttacaaaatgtatgctgaaataaccttctaccagggtgaattttcttcatttggagttctttgagttctgaccatttatgtatattgatgaagctaatgtttacttcttcatagaccagtggaaagaaaacgtagtaacatgtagttgcccagggaaagatgaagaactcaggggaccaagtctcccatctcaactccccataaaggtagtgatggaatgggatgatgttaaaaacacctcaactttccgtcctctttaagggaccgtgagaaggtagggatgttaccatactcagacttcttgctgagaaagctaagaaacaaaagcatttagtttttttcagtggcaggtgcttattaacgtttggcctatttgataaagggttaaagcaacaggaatgtgctactgctgttcccacaagcagtagtctaatttctttctttttttttttttttctttttttgagacagtcatgctctgtcgcccaggctggagtacagtggggccatctcggctcactgcaacctctgcctcccggattcaagcgattctcctgcctcagcctcctgagtagctgagattacaggtgcgcaccaccacgcccggctaatttttgtatttttagtagagatggggtttcaccgtgttgttcaggctggtctagtcttacccagtcagcagcagaaaggctctctgggctctaggtaaacacatgaaatttatatagtgtgtttaagtgtggttcctgtgcttctggagttggcacagtagtggtaccatttgctgtatcgacaacagtgggggtatagacgaaaaacagattgacacctctgaaagtatatatgaacacatgtcgatgcagcatttctggtgaaactaagcaaattgataaagttggcctagggtacaagacattatgtcatgtcccactgcattatgattaaacccaagattagaaaggagaaatgatggcaacagaaccagtttctccagctgtctattctcatgttcatcatcacagataggaaagggcagccggccctctgcatctgtgggcacatccctggattcagccaaccacagatcaaaaatatttggaaaaaaatgtagatagttgcatctgtactgaacatgtacagacttttttcttgtcattattccatacaaaatatagtataataactatttacatagcatttacattgtgttaagtattataaataatctagagatgatttaaagtatacaggagggctggccaccgtggctcatgcctgtaatcccagcacttttggaggccaaggtgagtggatcacttgaagtcagaagtttgagaccagcctggccaacatggtgaaaccccatctctactaaaagtacaaaaaaaaaaaaaaattagccaggtgtggtggcaggtgcctgtagtcccagctactcaggaggttgaggcaggagaatcgcttgaacctgggaggcggaagttgcagtgagccgagatcgcaccactgcactccagcctgggtgacagagtgagactctgtctcattaaaaaaaaaaaaatcatgaacaactctgcatgtaaatcaatacagagctgcattataatttacataggctgtataaaatcctgttgattagatgtaaaatgatttattaaattaattttctattattgggcatgaagataggttccaggctgggcacagtggctcatgcctggaacctgcctcccggtgctttgggaggcagacacaggagaatcagttgagcccaggagttcaagaccagcctgagcaacatagtgagacaccagctctacaaaaagcaaacaaaacattaggcagacagggtggtgcatgcctgtggtcccagctacatagaaggctgaggtgggagggtcacttgagaccaggagtttgaggctgcagtgagctatgattgcgccactactctccagcctgggccacagagtgaaaccctgtctcaaaaaaaaaacacaaaaaaccaaaagagataggttctgacttttcacaatagtgtatagagtttgatggagcagtcttatacatacttttttctgcgctagtgcaaacacctccttacaaatttctaacagtataattggtcataggaaagaaacatttttcaagcttttgattgccaaattgacgcccagaaaaggtatacctgtttctgctcctaccagtggccctacgaatgctcctttccccacattcacacccccaccgagttttatcattcttttaaatctttatttgccagtgttgacctcttctcttaaatgcctgtaacctcttcctgtttagcttctctcctaggtcagagagtgaactctgaagtcattctttagggattaaaatagtcatgcatttctccttttttctttgccttacatgcaaccataaatggtgagaacttctatcctttttcactttctgcttctgttcctttaataggtggattaatgataaaggtagattgttcaaacaacttagttatttcttaattttgttgtaagctctagttgccagactttaaactgtgctttttactttgcttaacaatgtaatccaatctacctcctcctttgggtgcctaagccatagcccttttaaataaaatagcaaatggaaaatcagaatccctttctatcgcaaaataagagtccagattacataactcattgtatgtgttttcacttggatgagagaatagagagtatggacctctttcatactttttttttaatgttccttttcctctagaattggtttctggggctaaaaggaaacagtagttagtaccactctgctcagaaacctcaaaaaacttcgacttctgtcattctcatcaaagggcaaaattcattgttcttctgtgatagagaccaaaaatacaaatagctaaactggaactaaattaagaaaaacagaagttaataaactccaccgcctcactcccatctcttcgtaagttagtaggcttgtaagtcctaggctggttagttcattcatttgttcactcatgccagccattgaggattattgtgttctaagtgctgtgctaagccccagaaatacaaagacaagtgagtcatgggcctgcctgcaaggagtgaggagatttactcaaaattgagagctggaaaaagaaaggcactttccctggcctcatagccctccgtgacttcaaagtattcctctctggggtcatgccactagggataatagcattatccaaaaacatttttggaaatccttttagaattattctcagggactggagtacatttatttttaaaaagaaacttggtgttttaaaatctttttttttttttagggagaatctgctttattatttgagaagtttcaaaaaatatagaaaatacagatgataatatggcaagtatctaaaggtctccacttaacagaattaacatctgttaacattttgtcacttttgctttagttgttttttttttaattaaaaaagagaacattacagataaatgtgaagtccctgttattctgttgcccatttctgttctccctgctgctccctgagagtactaacacaaaggtgtacttctggggtgtgtgtgtatatgcatatccataaacaatatatggtatagcttctggagggatccaaagtcattagcactcaagcaagcctattaaataaaataatatcagcttgagttaaagataacatatagccgtgaaataacggagctgatttttaggtaccttgtcaaatagttctgaaagtaattgcaaagaggagttccaaaagtgagttcagaaagacagctttatcagaataaattgcatggtactgcatacaggaaactataaagaacaacggttatttagaactgttcattctgacagtgtttttcaattactccttaatattataaccacttactcatttcctgaaatcaccaggaaatttttcaaaaagatttttctcccccgatgaatatacccacgatttgcatttgacccaagataagcagttgagtcgataacatgttaatttttaaatacatggttttaaaacacagaataaaaattctacctcattgcttggagactcaattaaggagagtatgcacattagcaaaaagaagatgtgatatttgctcagaagtcttgaagtggatattttggccttcgtatggctgaatggtcaagcttgactctctcgtttgctcagggaggcccagtccctctgctgccacgggtagaaatactttttcctaaatcgctgcttcttctcactgccatacagagcaatattcaggacacagccaaaaccttctttggcagacctttttgagttctctctactcagctttctgctgtgtaatatgagcactctagagaagttgggctgtcctcaggaaattacacttggggtctgtggttccccaggaagacaaactggagctccctaaggggtactagtcatcatacggcatttatactagcattgcagtccactttcacctatgcaagtagaaaaactcaggctcaaagtccactgacaatgcaggagtcccttatctgctggttaacataaatgttgttttaagatgatggccatctgttgtctgtgagaacaagactatcacccacctgttgacatgctggctggtttaatatcttactctttcattccaaataactacctggtctcacagatccccttagatggggtatccaatttacctcctgtaccttattctctgtccaataatttcactcaaatcaacaagatattttattgcctatgacttcctctaggtattacgggagattcaaaacacaaacagacaagcagcctatgccctcagaatccagctggggtgagtgggtgactataaatgcaaaagttagagagcatggggaacagtgtttgattgtgtggctggggaggggtaaggacaaaaactcagagagagagaagcctgtagccctggctacagaagggcaacacctctgaggagatgagtctcagctgggccctgaagggaggtgactcacagatgaaacaaacctggtgggaagaatagttagcagtgtgcagaaggcattggaagggattccaggggaggagtgaggagggagccacagtcattccgatgtgaggtagtgagatctgggattagactgggtcatcagaatggaaaaaaagggcctgcttctgcagacagtttaaaggaatcagctggatgtgggaagcaactacatacttattcattcattcatttcatgcatattgcttatagcctactatgtgcctagcactattctaagtgctgaggatagagtcatgaataagatagacagggttcttattctaaaaaaagtaatataccagtggggagacaatgaagaaataaaccactaaataaacaaggaaacatcagataaaataagtgtgatacagagaatgtaaacgggccattgagagggcatggattctttagatgggatggtcaaggaaagcatctcttagagaaaaacctctgagccaagatcaagcaggggaatgacgaagcacatgactgaggcaggagtaaatttgatgtgttggaagaaaagcaagaactggtctgtctctagtggagtgaatgaggggagaggaggagagctgaagagggaagttagcaaagaacgaatcacataaaagccttaaaggcaatggaaaaaatttaaatgttattcaaagtgcaatggtgtattagtccattttcatactgctatgaagaaatacccaagactggataatttataaagaaaaaaaggtttaatggacttacagttccacatggctggggaggcctcacaatcatggcagaaggtgaatgaggagcaaaggcatatcttaaacggcggcaggcaagagagcgtgtgcaggggaattgccctttataaaaccatcagatctcgtgagacttattcactatcatgagaatagcatgaggaaaaacctgcctccatgattcaattatctcgcacaacatgtggggattatgggagctacaattcaagatgagatttgggtggagacaaagccaaaccatatcaaatgggatggtttatggagcagggcatgatgcgattgacttttgtgtttaaaagatctattgtacaaagaagcaaggaaaccagctgggaggcagtggagaatccaggggaaagatgacgatggcaaaactagagagcagagctgagaaggagagaaccaggcagctctgggataacattctggagctagggctgacgaattagatatggggtggggcaatgaaaaacaaaaaaaaagagaaatcaagatgtctccagggttggatattgatgcttttaacagagattgaaaagactggaggagaagcaggcttttagggtgaatcaagggtttaactggggacatatggagtctaagatgcatgttagacattcaagtagaattagctactatgcagttttatttaggaatctgaaactcaggggagaagtcaagactggatatttaagtttgcaagtcaataccaaacatatttttacataagaaggaaaaaatattgatatgattttgataagtttttaatagccagaaagctatatgcgtaatatggtatcattttaattaaaaaataaatatatgcataactctctgcagagataaatgatcaatacatataacaaggagagaaccagaaggacatacgccaatatgtcatgagtgttatctctgggtagtagaattattgatgacttttgtgtacttgggacatgcatgtatgagtgtatgtatgcatgcatattttgcaagttttcctcaaaggatgcttttgtaattggaagaagaagcaattataaaataaatggcacaagatttccatcctggtcaaatgggataaggatgatgccaatgagaaattatgaaaattggaaattagacttagttttggggggatgattttttacttccctcgtagaggttttgtttaagacgatgtagtagactgtacctttacatatatttgctgtccctcccgatgggaggattttacttttcacctgttgaaggtgatgtggtcacttggaggtgaagagatagcctggactttgtcacattatctttctcctattctaaacaatctgcagcgttccaggtggtggatgatctgtcatcctgcatcctggagtaaagatgattaaagcagagctgcagctgccctctgaaggcctttgtttttgtaaaccactgagatttttgaattgtttgttatctcaccataacctagcccaccctaacacagatgaacataaaatacagaacatttctattgggcggcttgaaatacaggcttggggcatcagtggtaggtcagcatggaaaatgttgattaaaaagtcatctgtgaggtggagattgggactgaagaatggataaattttctgaatggaaagtataaggggaagagaagaggaatgggcctagaggaagagtcactgtcaatccatacaaaaagaagagatacgaaaagataggaggggggatttggccaacacatggcagaccgttgtagtatcagaaaagagagctaggagggtagttacaaagatcacatgccaaattatgagggcaaagagccattggatttaccctgaaggtggtcattgaaaacctctgaattagcagttttagcggagctgtggggaaggaagtcaggtttcataaggttatagagggagtccatgcagaggaaatagaggaagctggtggaggccactcctttaaaaagcctggatgaggccgaagagaaatgggacaagtggtaaccagaaggcccctacaaggctgtgacttttacacaaatatgacatacaatgctgaacaaaggatgtgctgatcttacagaggaaggatgtgttttattcccaaaaaaaactttacatatgggtaaagttattcaagagaccctgtgctgtctaatatgcaacaaatttttctttgcaccagcattaagacttctaacaataagtaaaatattctatttagatactttttacaggagattttgaaactctgatgacactgacatactacctttcagaacatggtactgtttaaaattttattatttttatatttatcttcatatgtttaaatttgaaaaattacaggaaagagtacttttataattatgtttttctgtttacaaaccacctcctgtgtgctgaattttgcctccccaacatttttcaggggagcatggccctactcgcactttgagttcagatttctggccttcagaactctgagaaaataaatttcttttgttttacgctatccagtttgtggtagtttgttacagtagtcctgggaaactaacaaaccaccccaaagtttagtgacttaaaacagccattattatttctcacaattctgtgggttggcaatttgggctgggctcagctggacagttattctgctggtcttcctgtagacattcacatggctgccattatcgggtggctcaagtgaagctgtagggtctaagatgggctcactcacaagtccaggaccttggtgctgactgttggctgagctttccctcttcacacggtctcttgttgttcagaaacctagctggtcttttttgcattcttagctggtaaagggaacattctaagagaaggaaggtggaagctgcaaggcttcttgaggcttaagtctagaactctccaacgtcacttccaccacattcattggttaatgcaagtcataaggcaactcagcttcaaagagtaggagaatagaatcaacctattgaaaggaggggctgcaaaatagttggtcattttaaccaaccacagcacccaaccaaaaaaattaatactatcccgtttcagatttcagaatgtttaatcagaaggccttgtctttccctacgtatatcacaatacccattttagtggcagagaaactgagaccaaataaaactgactcctttaaagttaccaagtgagtcatgctttgtgagagacatgaagacaactatatgtctggaagagctaaacatagtcctgcctggaggcaggtatatgaacttaataatcccttgagatgctcttaaatcccataattacactgatggactccagattgcagagctgtctggtccagagataaagcagcggtttgagagtatcagagagagaaggtgcctgaaaattgccacatgtccccaaaggcaggatttgaggctaaattaaatgataaagagttaccaagctctttattctcaagagttaccaaataagcttagaaactcaatgactgctgctgtctagtgttagttctggaatgggagaattaaaaatgagtagaaaaagaaaatagagacagagagactaacatatctgaaagataggtgctgtgggcagtcttagaaggatcacccctatatcaattaggattgcttttagctgctgcaagtaacagccaaccaaaccatccaatggtttaaacaaattaggggtttatttttttcttttcatttatttatttatttttaaatttaattttattattattattatactttaagttttagggtacatgtgcacaacatgcaggtttgttacatatgtgtacatgtgccatgttggtgtgctgcacccattaactcatcatttagcattaggtatatctcctaatgctatccctcacccctccccccaccccacaacagtccccggtgtgtgatattccccttcctgtgtccatgtgttctcattgttcaattcccacctatgagtgagaacatgcggtgtttggttttttgtccttgcgatagtttgctgagaatgatggtttccagtttcatccatgtccctacaaaggacacaaactcatcatctttatggctgcatagtattccacggtgtatatgtgccacattttcttaatccagtctatcgttgggcatttgggttggttccaagtctttgctattgtgaatagtgctgctataaacatacgtgtgcatgtgtctttatagcagcatgatttatagtcctttgggaatatacccagtaataggatggctgggtcaaatggtatttctagttctagatccctgaggaatcgccacactgacttccacaatggttgaattagtttacagtcccaccaacagtgtaaaagtgttcctatttctccacatcctctccggcacctgttgtttcctgactttttaatgatcgccattctaactggtgtgagatggtatctcattgtggttttgatttgcatttctctgatggccagtgatggtgagcattttttcatgtgttttttggctgcataaatgtcttcttttgagaagtgtttgttcatatccttcgcccactttttgatggggttgtttgtttttttcttgtaaatgtgtttgagttcattgtagattctggatattcgccctttgtcagatgagtaggttgcaaaaattttctcccattctgtaggttgcctgttcactctgatggtagtttcttttgctgtgcagaagctctttagttgaattagatcccatttgtcaattgtggcttttgttgccattgcttttggtgttttagacatgaagtccttgcccatgcctatgtcctgaatggtattgcctaggttttcttctagggtttttatggttttaggtctaacatttaagtctttaatccatcttgaattactttttgtataaggtgtaaggaagggatccagtttcagctttctacatatggctagccagttttcccagcaccatttattaaatagggaatcctttccccattgcttgtttttgtcaggtttgtcaaggatcagatagttgtagatatgtggcattatttctgagggctctgttctgttccattggtctgtatctctgttttggtaccagtaccatgctgttttggttactgtagccttgtagtatagtttgaagtcaggtagtgtgatgcctccagctttgttcttttggcttaggattgacttggtgatgcaggctcttttttggttccatatgaactttaaagtagttttttccaattctgtgaagaacgtcattggtagcttgatgcggatggcttgaatctctaaattaccttgggcagtatggccattttcacgatattgattcttcctacccatgagcatggaatgttcttccatttgtttgtatcctcttttatttcattgagcagtggtttgtagttcttgaagaggtccttcacatcccttataagttggattcctaggtattttattctctttgaagcaattgtgaatgggagttcactcatgatttggctctctgtttgtctgttattggtgtataagaatgcttattatttttatacattgattttgtatcctgagactttgctgaagttccttatcatcttgaggagattttgggctgagacaatggggttttcaagatataaatcatgtcatctgcaaacagggacaatttgacttcctcttttcctaattgaataccctttatttccttctcctgcctgattgccctggccagaacttccaacattatgttgaataggaggtgagagaggacatccctgtcttgtgcccgttttcaaagggaatgcttccagtttttgcccattcaatatgatattggctgtgggtttgtcatagatagctcttattattttgagatatgtcccatcaatacctaatttattgagagtttttagcatgaagcgttgttggattttgtcaaaggccttttctgcatctattgagataatcatgtggtttttgcctttggttctgtttatatgctggattacatttattgatttgtgtatgttgaaccagccttgcatcccagggatgaagcccacttgatcatggtggataagctttttgatgtgctgctggattcggtttgccagtattttattgagtatttttacatcaatgttcatcaaggatattggtctaaaattctcttttttggttgtgtctctgccaggctttggtatcaggatgatgctggcctcatcaaatgagttagggagtattccctctttttctattgattggaataatttcagaaggaatggtaccagctcctctttgtacctctggtagaatttggctgtgaatccatctggtcctggactctttttggttggtaagctattgattattgcctcaatttcagatcctgttatttgtctattcagagattcaacttcttcctggtttagtcttgggagggtgtatgtgtcgaggaatttatccatttcttctagattttctagtttatttgcaaagaggtgtttatagtattctctgatggtagtttgtatttctgtgggatcggtggtgatatcccctttatcattttttactgcgtctgtttgattcttctctcttttcttctttgttagtcttgctagcggtctatcaattttgttgatcttttcaaaaaaccagctcctggattcattaattttttgaagggttttttgtgtttctgtttccttcagttctgctctgatcttagttatttcttgccttctgctagcttttgaatgtgtttgctcttgcttctctagttcttttagttgtgatgttagggtgtcaattttggatctttcctgctttctcttgtgggcatttagtgctataaatttccctctacacactgctttgaatgtgtcccagagattctggtatgttgtgtctttgttcttgctggtttcaaagaacatctttatttctgccttcatttcattatttacccagtagtcattcaggagcaggttgttcagtttccatgtagttgagcggttttgagtgagtttcttaatcctgagttctagtttgattgcactgtggtctgagagacagtttgttataatttctgttcttttacatttgctgaggagtgctttactgccaactatgtggtcaattttggaataggtgtggtgtggtgctgaaaagaatgtatattctgttgatttggggtggagagttctgtagatgtctgttaggtctgcttggtgcagagctgaggtcaattcctcggtatccttgttgactttctgtctcactgatctgtctaatgttgacagtggggtgttaaagtctcccattattattgtgtgggagtctaagtctctttgtaggtcactaaggacttgctttatgaatctgggtgctcctgtattgggtgcatatatatttaggatagttagctcttcttgttgaattgatccctttaccattatgtaatggccttctttgtctcttttgatctttgttggttgaaagtctgtttcatcagagactaggattgcaacccctgcctttttttgttttccatttgcttggtagatcttcctccatccctttattttgagcctatgtgtgtctctgcacgtgagatgggtttcctgaatacagcacactgatgggtcttgactctttatccaatttgccagtctgtgtcttttaattggagcatttagcccatttacatttaatttaatattgttatgtgtgaatttgatcctgtcattatgatgttagctggttattttgctggttagttgatgcagtttcttcctagcttggatggtctttacaatttggcatgtttttgcagtggctggtactggttgttcctttccatgtttggtgcttccttcaggagctcttgtagggcaggcctggtggtgacaaaatctctcagcatttgcttgtctgtaaaggactttatttctccttcacttatgaagcttagtttggctggatatgaaattctgcattgaaaattctttcctttcagaatgttgaatattggcccccactctcttctggcttgtagagtttctgccaagagatcagctcttagtctgataggcttccctttgtgggtaacccgacctttctctctggctgcccttaacatttttcccttcatttcaactttggtgaatctgacaattatgtgtcttggaattgcttttctcaaggagtatctttgtggcgttctctgtattttctgaatttcagtgttggcctgccttgctagaatgggggacttctcctggataatatcctgcagagtgttttccaacttggttccattctccctgtcactttcaggtacaccaatcagacgtagatttggtcttttcacatagtcccatatttcttggaggctttgtttgttgctttttattcttttttctgtaaacttctcttctcacttcatttcattcatttcatcttccatcactgatacccttttttccagttggtcacatcggctactgaggcttctgcattcatcacgtagctcttttgccttggttttcagctccatcaggtccttttaggacttctttgcattggttattctagttatccattcgtctatttttttttcaaagcttttaacttctttgccattggtttgaatttcctcctgtagctcagagtagtttgatcgtctgaagccttcttctctcaactcatcaaagtcattctccatccagctttgttccattgctggtgaggagctgcgttcctttgcaggaggagaggcactctcatttttagagtttccagtttttctgctctgtttttttcccatctttgtgtttttatctacctttggtctttgatgatggtgacgtacagatgggtttttggtgtggatgtcctttctgtttgttagttttccttctaacagacaggaccctcagctgcaggtctgttggagtttgctagaggtccactccagacgctgtttgcctgggtatcagcagcggtggctacagagcagtggatattggtgaaccgcaaatgctgctgcctgattgttcctctggaagttttgtgtcagaggagtacctggctgtgtgaggtgtcagtctgcccctactggggggtgcctcccagttgggctactcgggggtcagggacccacttgaggaggcagtctgcccgttctcagatctgaagctgtgtgctgggagaaccactcctctcttcaaagctgtcagagagggacatttaagtctgcagaggtaactgctgtctttttgtttgtctgtgccctgcccccagaagtggagcctacagaggcaggcaggcctccttgagctgtggtgggctccacccagttcgagcttcccggccgctttgtttacctaatcaaacaactaactcggcaatggtgggcacccctccccaagcctcgctgccgccttgcagtttgatctcagactgctgtgccagcaatgagcgagagtccatgggcataggaccctctgagccatgtgtgggatataatctcctggtgtgccgttttttaagcccgttggaaaagcgcagtattagggtgggagtgacccgattttccgggtgccgtctgtcaccctttctttgactaggaaagggaattccctgaccccttgcacttcccgggtgaggtgatgccttgccctgcttcggctcacgcatgttgcgctgcacccactgtcctgtacctactgtctggcactccccagtgagatgaacccggtacctcagttggaaatgcagaaatcacccgtattctgtgtcgctcacgctgggagctgtagactggagctgttcctattcggccatcttggctcctccccttatttatttttttcttacataacaagaatgccagtggttggccctgcaggcttggtgtcatggcccccaaggtaccactggagactctggttctttgtgtctttgtgtcccaccaaccttagtgtgtggctttcatccttatggtcacaggatgactcctaaaactctgtacagtgaatcagtattggagacaggaagaagaaaggaggtaaaaaagacatgccagctaactttgctcccattaggaagctcttctagaagctcacagaattacatttgtttatgtatttcattattcagagctgcgttagctttgtctacaagggagattggcaaatgtagttttcattagcccagcacattgtcacccccaacaaaactagggttgagttagaatgaaggggctagtgcatattgataggccactagtagtttctacacagcctccaacaattgctgtggatgtagattagtaacagaacttccactatggcatcatagcacctctatcccactagtacctgtagtaggtccaaatcatctaattccaggagcctggcttaaagaagaggaatattgaggcttctaggtccagtattaatcaaggtaagctagctgtgagaacaaacaatctcaaaatctcagtgaacgaaaccaacaaaaacttgtttcatgtttatatcacagtctgatgcagatcgagtggttctcctccaagcagtgactcagggacccaggctgcttccatcttacagctctaccatcttgtgactttcagattatgttggcatcattcagccagtgactaggaagaagagagaatgaaagattgtgcacccaattcttaaatacctccactcaacactgggacacatagcttctactcacacttccctggggaggactgcttacaagattcatcaatctgcaaggagggctgggggaatatattatagttcttgcctggcggcacttccagcaggaacacttcactatgaaaagggagcacaagtctttggggggacagctagccttctgtgccacaaaagcccagtcacaaagaaaaagccattaccaaaatgttccataaacaatgtagacctactgtggtttgctgttgtctgatagataaaaactgtgttgttttagtcacaaggatttggatgtgggagctgcaaggaaagcaaaagccaaacaagtacagctgaagcacctgagatcctaggaggagacaagaagaatacaaggtgccattgtcctatcagccaggcagaaagatggtaggaaacaaggccatttaaaatctaattgcaattgcaagggctgggtgctgtggcttacgcctgtaatcccagcactttgggaggctgaggcaggtggatcacttcagctcaggagttcaagaccagcctgggcaaagtggtgaaacctagtctctacaaaaaatacaaaaattagccaggcatggtggcatgcgcctgtagtcccagttactcaggaggccaagatggaaggatcaattgagcctgggaggttgaggcttcagtgagctgtgattgtaccactgcactccagtctgggtgacagagcaagaccctgtctcagaaaaaataataataaaataaaatctaattgcaggcaaggccacaggaagtggcaagtgcaactaaagacttcctagaaatcccacacattgataagcagccgggttgttcagccagtttttttttctgagaacaaccaattttaaaatattttaggaaaaaccacaatattgagatatttttaaacagcttatatttaaacagcatatatttaaacaaagtgattaatttagaattcatattttatttgagaaaaaaacaagatgttcctggtctggcagatgacattctaaattattcactcccacttgtggaatagctgagttatagtccggcccctcctctgtagaggaggatttataggagaagatgagtcacgttactttttgtgactatttttctttgcatttgttgactcctcttgttttattcaccttctaatcattgaataatctgtacaatcagactgccttattcatgttggcagttgttttaataataacaatgcacagagccattgctactaacagaaagcagggcagacctttgagtctgagtttggggatacaagtttgattccatcccagctccactgattcccagcgagatgtggttcaacatcataggaccaaatgaaataaaaagcgtgaaaatgctacacaaatcaaagagtgctaaagacatattaatgaaacatctgtaaaatgggaataagtaccacgtttctgaggtagcatgtaatacaactggcacagggttccacacttggtagatactcaaaaaagaaaataaaaagttaacatggacaaagtaaaataaactggaaataggagatggagaaatgttaaaacaacaggcaccataataatgtaaagtaggatttcagctcatttacaagcacagaggttatatggtaagtcctcacttaatgttgtcagtaagttcttggaaacagtgtctttatgtaaaacaacataaaggaaaaccaattttgccataggctaatggatataaacaagagttaagttccagtacatatgtgatggcatatttccagttacaaaatatcaccaaacttctaaataaagaccaaaagactcctaatattaaacattgaaataaatgtgagctatactttcatataagaaaaattaatgcaaacaagtacaataattatttactgagttattccagttcggggtcgtggatggccagagtctatcccagccgtccagggccaagtttggaacccaccctggccaggacgccatcctatcacagcttgcactcacacacactctcactgggaccatttagacacaccgattcacctactctgtgcatgtttgggatgtcaaggaaaccggagtaccctgagaaagcccacatgggggaacatgcacactccacacagacggtggctccagccaggaattgatttattttctcatcaatgttataactaaatgactttgaatgaaacaatgttatttgataacctgctgtatttagagttcacaaaatttatccctctgaaacacatacacacacgcatggccgcacacacacgtgcatgcacacactgcacacacttaatgctaaacttgaaagagatttaaaggctaaaaggaaagttggactttaaatttcccctggagctcacattttctgggtactgaaagatatggtagatacatatgattgccttttccaaaaataacttctatggaaaatcctgagagttataagagactacaaaggtgatttgatagagccacttaagtaatgtatgcaatatgatcaccaggtatacttgtatgagagatgggaaagaaaggaaatattgaaagagcagaaccatgaaggagaagaagcaattgatcctgaagaatagcaactgtagtcagggattagagacctgcaaacaagtttcctattcttttcaaaaatgaagaatagcttcttattacaaaagctgtatatataaattatagaaaagtcagaagtgcaggtaagcaaatactttaaaaatcaaaattatctctaattctttgacttattaatcattttaacagcttgattgatattttttcagatacacacatacatacatacttctacaaaactggaagtatgcttatatattgtatcataacctgcttttttatttaaaaaatatcatgaacaacttttcatgtcattaaatattgttgcattacatttctaatgaatgcataacattccattgtaaggatacagcgtaatttaactcagtctgtattgagctacattgatttccagttattcacattagaaacagtacaccactgaataaatttatgcattcatctttgcttacctctttaatgattcttcacgataaatgctagaaatagaaccacagacttaaaggtctccattgatatgtgtggctcccttgttttcctttgcaaggttttgtgtggcatctgcctttaaaaggttaaagatatttttacttataacatccctgaactttacctcaagtcttggggaaagttattgaaaagtagtttgtattcaaataagtacaaactggcaaggtcaatcttttatacaggttatcagaaacaaatcaacctcataagatggaactaaacccattattatgattgagtcagcaaacttaaagatgtgtttggtttggacaaatactattaattccttaagttccctgtggccacagtttttttttttaatgaatgtttttctgagtaatcttggtcctatttgaggccatcttcatatgcactaccaatatttccagctatacccaacaggtaaactagccctctgtaggcaattaaatgtatattttcctgaagaaagtaaggttatatagaatataagtataaggtcacctagaagagctattaatgtattatggacaatttctttttattgccagagctacatgttacttatatttaagtctgatatttaattctctattatattcccttattattgaattaattaattcatccattcatatgacagatatttcttgagcacttacttgtgccaggcactgtgttagactctggggatttggaaagaccctgcttccctcatgaaacttacattccaatgatggaaacagatcatctgtaagtgcgtaaactaatatatcatgtcagataatgtctcatttccttatctcttaaataaaaaaatattctattccatagggctgttatgagaactgagtgagactatgtggaaattaccatacacatgtttaaaaaatattgtttctttttcctcttatcttttagaaaagggaaaatgattattgtttctttttcctcttatcttttagaaaagggaaaatgatttgtataaatcattaaatactcccttgatattacaaaactagcaaattgttttttgattttattttttaaattgtcacataataattgtacatattcatggtggtacatagtgatgttttggtacatataattatagtgatcagatcaggacaattagcatatccatcatctcaaactctaatcatttctttgtattgggcatgttcaatatcctccctttaagtatttgaaacgacacaatacattattgttaactacctcatcccacagtagtatagagcactagaacgtattcctcctatgtagctgtaatttcgtatcccttaacaaatctctcccatctttcccttccccctacccttcctggcctccagtaaactctgttctactttttacttctatgagatcgaagttttttagcttctgcatgtgagtgagaatgtgaagtgtttaactttctgttcctggcttatttcacttggtgtaatgtcctccatttccatccatattgctgcaaataacaggatttcattttttaatggataccattccagtgtgtatctatcccacattttctttatccattcatttattgtcagacacgtaagttgattccatatcttggctattgtgaaaatgctgcaggaaacatgggggcgcagatgtctcttcaatataataatcttttcctttggataaattcccaggagtgggattgctagatcatatggtagttctaattagcaaattctatattccatattaaaggaaggaataggtaaatttttttcaaattttttattttgttaaagatggagtaatcctcccacttcagcctcctgagtagctaggattacagaggtgagccacagcacctggcatgggataggtaaacattttttaaaatgtttgttttgtttcaggcaaaattaggtatcaactgtttctccacaaagaagagcagcttaagccttcacagcacatagttctgataattcaggtcttcttttgccatttctcaaacatagctatcttgtgttggtacatgcgatctgcagggccttagacgaatcatacatttcatctctctgggcctcagtttcctgaagatgaagttatgttatatggttcgtaaagttcatttcagggctaacttcactttgtccttgtaaaaattatctgcctagtgggtccactccccacctcaccaccccccaaaaaatgactgctgtgctccaacccaagccaatcaaaaatgataaacacttgactgtgacttttttcaagactctgttttacagagaagtggaaaggtctactgtggaatgcttatattttaatttgtcctcattgataggagaggacaaatgtaaactaggagaaatggaaaaaccagtgatacatgtcttgttatgttaaaggaaaaagctagagacaatatgattattaataattattttttaaaattaattcttgcatttattgagcacctgctgtatccctcatatgcattaccttgtataagtcttgtaatagcccaaaaagttaagagtgttcttattctcccaaggatgcagatatggaaactgaaactgagtacggttatgcagtatgtgaggggcaatgctgccacagaaactcaagtctagctgagaccaaacccatgtttttaaccacttgcttcttgcctttgccaatcattgccaccaacgagtcaaaacttacttgttgctggaacatggtttcatcctggccttccacggaatctgttgagcttgttttttttttttttccatatgccataatatgtttagtttcacctcagatgagacagaggatttactttcaagaaagttggacgctgtccactctaaacagtaccagaggtagccttacagcatcagaaaatcctgtggtagtatctcttcatcggaacttggaatatgattttaagagttttttctatcttttcattagagcaggccaacactgacttgatttttctctgaaattagctgtggacaaagattccttttcaaactaaagattctaagcttattttcccccatcactttatcaaaactagaaacaatccattaaaaacactgcccagccttcaggggcttaatcaactcagtggtataaagcatgaaacttgattctgagatccaggagagaatatttggattgccgggaggtgacctttatatgtttctttacgtgtataacaaatacatttcaattcgcgtctagccccttaaaaccagtgcatgtttctgaccctgagtgctactgacattgtgaatcgcactgcaaacagaacacgggtcactgttgttttcctgatctgggaagacatcatggtgtggtgaaagggacagtgcgctgctgatcagacttgggttctgtctctcctctgctaccagtgaaatgaatttcagatgcaaagtggaaagatcaattgtttcttggcctctttgctgagatcaagggaagaagaaagatcagattagttccgtgacagtccaatatttactgactgacccatgttctgtttcatctcaggatttccagggggctccaatttggaccactgcagcggtcccaactgccaacctatgttttcccttcttccctacctttcccctgcagcctcaagtggttccagataaagtgttattccatgtatctcactgtctgaatctagaggactctgatacccaaatgtgtttctcagagtgtgtcaatgaaagggactctttgacccacaatccccctttttcttcacaactccatcatcggcatcctcaaagacaatccatggtgcctactactcctcatcttattgacatgattttaatgtcagctctcgccgggcgcggtggctcatgcctgtaatcccagcactttgggaggccgaggcgggcagatcacgaggtcaggagatcgagaccatcctggctaacatggtgaaaccccgtctctactaaaaatacaaaaaaaaatttagccgggcgtggcggcgaccgcttgtagtcccagctactctggaggctgaggcaggagaatggcgtgaacccgggaggtggagcttgcagtgagcagagatcgcgccactgcactccagcctgggtgacagagccagactccgtctgaaaaaaaaaaaaaaaaaaaaaattttagctctcaaagttttcctccatgttccatgaaaatacactttacaatctagtattccccccaccacacacacacacacacgcacacacatatatactgaaacgaaaccatatccaacttcatttccatttccaattcattcaacattttctattctgttctattgcatttaaaaaacgctggtcacaagccactaaactgatctcagatcagactttaataaatcagactcccccttttatacgcacagagcactctctactgtttcttcctagtacttgtcacaatttgtaagtcctaaatcatgtgattgcctacttaatgtctcccgcaacctgcccctggtgttctgtaaacttcaagaggatatgttttgctcacctttgaatttttagatcccatacaacacctatcatatcataaatgtttaataaatatttattaaaagaattaataaatgaatgtggccaaacctattcaggtctgcatggttcctccctagagttccatcacacttcacagatctaaagtttcctcccagttgtggaggtttgaagctcaaaactgctggaggtgcttcccaccatagctcgtgaaggccctattggtgttttcttcctagtccgtctctagttgatcatgacagatgggccagtgtgttttgaagaagactggctgatgcctcaccaaattctggggacaggtgcctttctccaggggaattcatgaagagactctccaggggcagggcagaccactgggaaaaacaagacccttgggttttctgaccactggccacttgtttttcccacatcaggagagtttatcatctgtgctcatccacctcctgaggttgctttgctggtgctgatttcaggtcccaggcccctaaggtctcacactcactccacaagccacctacacagctgtagttgttttcagccgacagctaggttattttgccttccaagatattttcttttatttatttattcatttatttattttttgagatgaagtctcacactgtcacccaggctggagtgcagtggcacaatctcagctcactgcaacctccacctcctgagttcaagtgattctcctacctcagcctccccaatagctaggattacaggcaagcaccaccatgcctggctgatttttttgtatttttttgtacagatggtgtttcaccatgttggccaggctggtctcgaactcctgacctcaggtgatctgccctcctcagcctcccaaagtgctgggattacatgcatgagccaccatgcccggccaatagtttcttttttgataggcagctcttaaagccctcagaatacatctctaatgatgaaatcatcaggcaacttgacaaagagtgaagaaattgaagggttctctcaatagcatcccaaggaggctgacccacaccctactgcctaccataggctggcttcatgtgctctagtgctgtgaataaaggaaaaaactaacatgttgaagcatttatttagtgccaggaggcaggtactttctcagataccctttttcttctcacataattccaggtcattggcagaatagagatgcaaaccaagaacttgggcagcaccaagatgtagatgctaaaactttaaacttgctggacaaaatgataggggactttgaaataattattcagacaatttaggcaagcaaacaaaagcaattaaaaattgggcatctggctgggcatggtggctcacacctgtaaccccagcactttgggaggccaaggagggtggattgcctgagctcaggagttctagaccaacctgggcaacatggtgaaacctagtctctactaaaaatacaaaaaattggccaggcatagtggcgtacctgtagttccagctacttgggaggctaaggtgggaggattgcttgagcctgggagatggagcttgcagtgacctgagactgtgccactgcactccatcctaggtgacagagtgacacccatctcagaaaaaaaaaatgggcatctggccaggtgtggttgctcatgcctataatcccaacactggaaggccaagtctggacaattctttgaagccaggagtttgagaccagcctgggcaacatagcgtgaccccatctctacaaaaaaattaaaattaaaattaaaaacagccagacatggttgtgagcacctgtagtcccacctactagagaggctaaggcaggaggatcatcaaaactgcagtgagctaagatcgcaccactgcactccagtctgggtgacagagtgagaccctgtctcaggaaaaaaggaggcatccaaaaaaatgttcccttagatccattttttgtctgacagagacaggagaggtgatgaaagggaatgtaagagtatttaagggattatttctttatggtagcagaaggacaaagacatgtttgaaaaatttttaatattgtataaaatgatgatattttcttagtggtcttgttgttgaatccagagattgtggtcatgtagttcataggtaatttatcagttattatttattttttaaagcttttatttatttatttatttattttagagatgaagtcttgcaatgttgcccaggctggcctagaattcccgggctcaactgatcctcctttctcagcctccctagtagctgggactataggcacacaccactgtgcctgtctaatttgtcaacttttaaatgagatcatctgcaagttcaaggaagttagataaagggtgataccacagaaaaaaaatgagatttttctctttaagatgaatattgaatttagaattccttaattaatattgaggatcacatgcgagctacagatagggaatattgagtatttaaagcattctgaatgacctgagtgttttccttctcatgcttattaaaaacatttaccacttacagctgaattggaatatagttctacataaattgttatttacacctgatacacagaaagaaatgtgtttccttatttatcatactattaatttgaatgtgctattctttttttaattgctttaaagtcaattggggaatcagattatgaatatctattttactgcttccacatttcctaagttaatcaaatacgacaagttagtgagcttgtggaatttacttgaatttcctaatcttttaactgagagggtattttcgacagcaaatattttgtagcatccatttgtcattttttaaatattcaaactagttttttttaaaataatgccaagtacacttagtgcctagtaaatgctggccactgttattgctgttatcattattcttttttgtttgtttgtttgagagggagtctcgctctgtcgcccaggctgaagtgcagtgacgtgatctcggctcactgcaagctccgcctcccgggttcacgcccttctccggcctcagcctcccgagtagctgggaatacaggcacccaccaccacgcccggctaattttttgtatttttttttagtagagacggggtttcatcgtgttagccaggatggtctcaatctcctgacctcgtgatccaccctcctcggcctcccaaagtgctgggattatggcagagaaatgtttgtttcaaaagtgtgttagtctctaaggaaatgaatacttccagactaaattctgtttatagtattatcattaataaataaactaaaacattacttctgtttcattgccccaatgtatattgtattaaaatgttcttttctgatcttctctaagttaaaaaaaaaaaaaagaaacaaagttgagtaaacaagctgagcaaactttgtgttgaaactttaatatgtccgaggaaaagaatcttgcattaagtccaatacagagagtctgataatttggtggagcagagagcctcatctgaggtggctttccgtgaacagcatctctgaggtgtcacctgctaccacattcactgtccaccctgggctttgcccctcaagcaccagggctcaggtctcttgttttgcctgtttctccctatagtctccctggcctgtgccttttagacaaaacagattaacatcacctttaagccgtcaatactgaacattctgtctttataaggcctgactcattaccaattttatttggtcaattttaccttccttgctttcaaaggaacaccatttgcctatgtcaagtgttctctttcttttatttttcccttccttctgtctttcccctccttccttccttccttcctccctccctcctctctcctctctttcttccttccttgcctccttccatccttccctccctctctctctttctttctttctttctctctctctctctttctttctttctctctctctgtctttctttctctctttctttctttccatcttcttttctttctatctttcttacttttgatgtagctgtcacgacctaatgaaaatactggcatgagtgatgccacctttagattctccaccttcctgttcctgtcctattcaccaacatgaattggtttgtggctgtaagtacttggtgggttattgctcatagattcagttgcatttttgctgagatagtgctgttaccaaaagcaggggtgctgcttgaagaagtaaacctaactctgaaaaatagagactctccagaaacatcataatcttaaggatggacatttgtggcctgttattgttacttcattctaggtgacagagtgaagtgagtgagggcaaaaatgactgcacacttatggaaagagggctgcctccaccacagacaggtagtgggaggtcccactcttccaggttgaacccaatatcctatcttctccttccgctcttggtacctgttgttgctattgtaaacacttccctcacctgggactgcatatagatgaaagattgctggggggtttcccaggatcttgggccagtgccaacaaatggcaaactttcaagtctagagatggtcctatggcatgactgggggacaccacttccttcaccagaacattcacatccttcccaaggtgccacgcccagttcttttgtccaacaataaactctgcgaagtggagtgaagtcaccacccaagccttagcctacctctgaccacagcctgtgactccacaaagataaatgaaaagaggaaagtcagtgatgttttctatactgtcagcagcaatctcacagcctcaatacattttctttcaaaagtttaatatgtaataactggcatttcttcttcattcctagttggttagactgcatcacatctgccatgccaaactattaagagtaatacaattcttactcttagtttattaagagtaaaaactattactcttaatagtttagcatgctattactcttttcttattttttaatttttttaattttttattttttgagacggagtctcgccctgttgcccaggctggagtggtgcagtggcacaatcttggctcactgcaacctctgcctcccaggttcaagcgattctcctgcctcagcctgccaagtaactgggattacaggtgcccaccaccatgcctggctaatttttttttttttttgtatttttagtgggcaaggggtttcaccatgttggtcaggttggtctcgaactcctgacctcaagcgacgcccccgcctcggcatcccaaagtgctgggattacaggcgtgaactgctgcacctggctgacgtgctattactcttacagcatctggacaatccctaacagtctgaaagctctataatgttgcaggtagtccaaaggccctatcccttattctagaacacaggctttatagcacaggctttggcaagtctgtaacagtctgaactcctccactgtattccacatactagggatcttttaagttgtcattatgtcctggcacaagcatttatcatatttctgggagcatgtagggttcaagatgcgagggcaagagagggctgagttgtttgttattaagctgacaggaaatggccaaggctcatgtgctactgcttgcagttgggcaaaagaggataaattaattgctttgtagaaattcctttctgcattctttagggaaaatttttccatgtgagctaaatgagtcaaagggggtggttttgggctcaacagctttgacattgtcccttcaaggaatgaaacaattaaagaaactgatctcctctgagaaaaagaccatttacaataacctatctactctacataaaatattcccagtagactcatcaaaacaagaccctctgataccacaccatactgggtttttccttattgggattcccccatgttttttctttaatgcttccccatgttttagaaacagatttgcttacccggaaccttccacactcaattccaaatttatcatagtactatcatttgggagtaaacaacatgtaaggggcctacacgggtggaaagcccattcaagaaactgaggatgatcaaatagtagagttgatagtatgtgtataatcccagggaggagtttcatgacggattagaaggtcaacactgcctgatgcagccgaaagatcacattaaaacaggacaggaaggaagtcctggctgtccagcaaaaggtctttagtggctatatcaagagaagcttttacagaagggtgagggtggtagcctgcgaacattggattaggagtgagagggactgaaggaagtagaaactcgagctcaggggaaggggagagaatgagcttgaggaaggccctctgatgaagggaaggctcttttctgatgccagtgagttgagcagacttataggaagcaaagaggagtctagggacagacagggattgtccaggtaatgtaggaaacatttgacaaggacagatctcgaataaaaacatgaatgcaatttctgtttcagatgtctcctttgcctgccccatcccacattctagaaaaatatttggtgcattaacagattttggacttcacagggcttcacttttattgtgcttaatatttgttccttggtgaaacacaaagagacaaactacacaaaaagagaatcatacttgatgaaaaaaatcaatgtttagaagttgctcttaaatcttttacccattgctaacatgggtatttggatgccatttggaacgtattccaggactacttatccatgaaaggattaatgatattggagccaggttcaaagtctcagcaacaagctaaaacctgctctttttagtagtcaggggcaaagcttagtatcctttcttctgaaagctttcgcatgctaagctttccattgccaagcccccgggaaggaaaataccagaagtttcactccgatagcagctttttctgagatgcgcctggtgataacattttccagtagggctatcttctgtctccttccttctctgtgtgtaccagtaaagccttgtacaagtctcttaacctttcttggcttcagtttccaaatttgtaaagtgaagataataatacctccctcatagagttgttgtgaggactacatgggctaacgatcagacagaaagcactcattaagtgtgactagcattgttaattgcagtaatagtagttctagtagcaggcttttccaggttataaggattaaagatacgctcatgttacctaagttaatggtgcattattttaagggtacaccaaaaagtaagaagaatgggaaactacttaaccagcacatggggtgcagaagcgagagcaattgtgttttctttttttttttttttttttgagatggagtcttgctctgttgcccaggatggagtgcagtggtgagatctcggctcactgcaacctctgccacctgggttcaagtgattctcctgcctcagcctcctgagtagctggggctacaggcatatgccaccatgcccggctaatttttgtacttttaacatagacgggggtctcaccatgttggtcaggttggtctcgaactcctgacctcatgattcactggcctcggcctcccaaagtgctgggattacaagcgtgagccaccgtgcccagccccaagggaattcttacagcctgacaggtttggaactctgagtctctctgtgtgtctgtgtctctgtcactccaccatatgtttagcagggttaattaatttgcccaagatcacacaattagtagatgattatgcaagatttgaaccagttgttattcattggaatatgattactgtgtaagttagcatgagaatattgaaaataaatgtcttgttagattcatttattttttaaaaaattcctatgtaggtcgggcacagtggctcacccctgtaatcccagcactttgggaggccgaggcgggcagatcacctgaggtcaggagttcaagagcagcctggccaacatggtgaaaccccatctctactaaaaatacaaaaaattagccgggcctggtgatgcatgcctgtagccccagctacttggtaggctgaggcaggagaattgcttgaacccgggaggtcgcagtgagccgagatcacaccactgcactccagcctgggcaacagagcaagactccatctcaaaaaaaaaaaaagtcctatgtatacttcttcacatcaatttaggcaggctttatttgttaacttttgttggtagccaacatgcatttaaactacttattattgtcctaatctaagaaaaactgagaaatggatgaagttggtcctagggtatcccaaagcacagagtgttttattctgtccttgggacagaggtttgattcaaaatgttttttcggaaactagccttgaacacctaattttattaatattctttttacactccatccctcctggaaaaggactggaccccaattcccaccattgcttttttgggacccattatcttccttagcttcctatgcatctacagggtagtctgggcttcacttcctcagtgtccctgtatgaaattaggtggatatagattagtctgatgtaggaatatcacactgtactaaggtttagtttgtatgttattctctcaagtaactgatctttcaatcgaactaaacacttcctatgtgctttaaggtggtgggaattacaagcatagcaagttatgattggtcacggatttctttcctctttaaatggtgacctactgcccattgtacctactcaaagcaactttctttaggaaaaaagaccacagtctactttcctaagcataaactcagttctcattccacctctaccacctgcaagatttgttaggcttaagcagtcccttaacttctttgagtgtttgttgccttgcctacttcattggaagtaaggctctggaacagggaaggtttgcctccataagactaaaagttatgctaatataagagactagcaaaatgggagacatattcagctctcttcttgtggggaataccttgcccttgaccaaaagccttgtcccagaaagagccgtgtgggtgttggctttgtgcccaacatgtggctcctctgccatgattgatggcttcatttaagaaacaggttttaggattttttcccctaaaatcttattcctgttaattatcatggatcaactttaccttagctcgtttaatacacagtcacctggtataaaagcatgtgaaaacccccagggatcgtaaccacatttatgcattgagaaaagagagtgaggccaagattttgagatgtgttcaaatgcaagaagcttttaaaatgcaaagtattctaaaactgttgaaagttgaagctaactgttgttcccttgttgaaggtaaaaagtaaagcatttttaggaaagcacttttccttatgtgtctaatatttgggaactgcataggagaacagtttaataggaaccctgatattgacagtaagatatattcttaatgtagtaaccagacccagggcagaatttgcaaacccatggtaggcatacaggtggctgaagaagaatcgggacagcaagatctcactgagatgcaattccattcctccatttgatacagattaagatttctgaaaaagaccatcctcctaaaccctcatggactctgcagataatatgaggccagaaaatgaataattcccaactcttgctatctcgttactggccagtgtgtctggcttcgctgagtgtgtgccttctgaagcgtaccctataattattcagcaggtatagtccagttcgtcctacttactttagcaagattacctttcttttatttttcctgtgaaaatccttctcttccttctttcctcctttgtctttcctctttgttaactttttaaatctaaagtgccttgaaaaacttgtttacatagtagtaagaaggaaaatgttgacttgtgctatcctgggaaccttgaccttcctgcattatggataaatcatttccctgcaggtggaagtggaaaattgcagatagaaccacattgactcacattctccttctacttccatttgagtgagcaccaagtatgcatcacgacttgagattataaagttggcttaatgatgagacaggtttctcagtcgggttttccattggctcgaagttcacaaggcagttgttgcttgtctcagagtgtccttaggtggactacatctgaacccttggcgttattataatgcagattctagctgtgctcaaaccaatgaatcagaatctcaggagggtggcgctcagaaatctgcatggttgatcagttctttagcagattcttatttttgtatgctaaagtttgagggtcaccactggagagattccagaacagggcctgcaagggaattgttcaaagtttgctcaagttaactttgttgttacagcattagcttgaatatcaggaggttttgtatttaagttctctaaaaaaagaaaaagaaaaaaagagaacagtctcaatatataaaaggaaaggttttcatatatgtgcccaattataagtatcttgagtattctaggagtctaaacagaatgtctttagatcatccttataacgatcctgagactcttttgactgttttgagttgaagacaggtaataagaaagaaatcaccaattaatgcagaaggaaataaatttctgtatataataatattcacatttgccatgtctcttttaaaaagtccaaataacaggcagagcgcggtggctcatgcctgtaatcccagcactttgggaggccaaggcgggcagatcacctgaggtcaggagtttgagatcagcctggccaacatggtgaaaccccatctctactaaaaatacaaaaattagccaggcgtggtggcacttgcctgttgtcccagctactcgagaggctaaggcagtattatcacttgaacccaggaggtggaggttgcagtgagccgagatcgcgccactgcactccagcctgggggatagagcaagactccatctccaaaaaaaaaaaaaaaaaaaaaaaaacagctcaaataactttaccgtacataactttaccatacatgtcctctagtctcttatcatttcttcatatgaagaataatttatactcattgatgtaaattttgctatattttatacaacaaacatagtattattttaatattgcacatagagaaaaatacctcttcccctcaaaattagaagggttggtatttttattcaggcttattgatttaaaatacctgcttgatccgtaattcaggccatacgatttcaccaaaacaaatatcctaatagttgtcatcttgaataactgtttagtgcacagaatgtagtctcatttattaagaagtgatttaagagattattacttctgcatctatcacactaacatgaccaactctttagtaagggaagagtaagggaacttattttatatctagatagaaattttattaaggatacagtattaggattcataggggaaatagtggatagatcacaagaacgaggctctttctgagccctgcaggaaagaatatttgcagaacaataaaggacatggtggcttcctggagaatgttggccgaagactgagccttacttctggaaaaggctcagtgctagagccaagtgagcatcgatatgccaatacaggcaagaaaatcctgcaagaggcagacttggttcttaggtcggaacaggctctgcttcagaacttgatccggtacccaattcgtttctgcttcagcttctttttctataaaatgagggtagtacttatcccatgagggagctgttatgaggataaatttggctttattgaatgtgcatgattcctggaacccataaagatgtcaaatttagaagcctcagagagatttcctttgctctgtgaataactaaatttggttagctggggtggggtctgggtacttttccttgtgaagaatttttccctcattctggtcatctcctcccctcctatagaggcaccatatatttttcttgtctcaggtacctatagtgataaaacaccctgagctgaaaggatcgctggatagggcagtctcaatacaaaagaatgtggcagaagctcaggcttcagtgcacatcagaatagaagcttcatgagggcagaggcttttgtctgctttcctcattgcagtatccccagaactttgagcaagtgcacactcgatgaatacttgaaagaataaatcaatgtcagacatctgggcttatgtctcatctttctactgttctcaactaagagattctcgtcattctacaactttcctgagcctgctctccttctccaaatattcacccttccaggcactgactccacctcccacatcagagctttttcttaaagtaaataacagtcaacaattaatagcttcataactttggaacagtgcagtgtctttggtttaagaagcattgtttccatcctccaaactaaaataaattttgagaaaagatggagatggtttgggactggggaagaagggaatggaagaagtgattatttgagggcacattaactatttgtacaaagtagaatatcttagttaaatttggctacatagcaagcaggtatcattaaatggatgtctgttagaatcttgattttcaaattaactagatagtcagcgttagttagactgagggagggtgattacagtcctatgtcactgagggagaatggtgaaagggcaagagaaggctggcaggtagagctggaatttttctgccagcaatagaccagtggttcccaaatgtaagcctgcaacagaatcatctggagggcttgttttttgtttgttgttgttgtttgtttgtttttggttttgtttttttgagacagagtctcactctgtcgacaggctggagtgcagtggcgcgatctcggctcactgcaccctcagccttccaggttcaagcgattctcctgcctcagcctcctgagtagctgggattacaggcatgtgccaccagcccagctaatttttgtatttttcgtagagacggggtttcaccatgttggccaggatggtcttgatcccttgacctcatgatctgcccacctcggcctcctaaagttctgggattacaggcgtgagccaccgcgcccagccaggagggcttgtgaaaacacagatagctgggcccatccctagagtttaggattcagtaggtctggcggaggcctgatagtctgcatttctagcttggccaggggatgttgatgttgctggtcccaggaccacattttgagaaccactgcaatagagagtgtgcatgaaaatacaacaacaattacctgatggtccttagcttagttcagttgtcccccacaggttgaagcagtgttcaagggcaaacaaaaactttctctctcagccacctccataagttccatagtttatttaacaaagcaaactcacaaagaaggaggaagttaggactgctccatttccccttatagcaaaggcatgtgtatttcacaactgcaatcagcttgaatagcagaggctggaaggctctccatgtctttactgaagtcacgtcactaagtcacacagacatgctgctaattcactgccttggccagcacatctgaaaataaatagcaccattataggccctttcatgaatatacagcatgtggcctctaaattggccaaggagctggctatgctgggacaaataacttagataaatcacaaatcagagtggagaaatgaggtgtttttaatcaacagcatccaacaatgtgtgttgagtttaactgaatccaggtagaggagggagtgggtgcaagagctcaaagtatgctgagaatagttttatttcaaaattccaggagacttagaaacaacatggtaatgatgaaaggagcctgaagagactctttttttttttttttttttttttgagatggagtcttgctctgttgcccaggctggggtacagtgtcacgatctcggcatactgcaacctctgcctcccgggttcaagcaattctcctgcctcagcctcccgagtatctgggattacagacatgtgccaccatgcccggataatttttgtatttttagtagagatggggtttcaccacgttggccaggctggtctcgaactcctgacctcaggtgatctgcccgccttggcctcccaaagtgttgggattacgggcgtgagccaccatatctggccctgaagagactcttaagatactttcataatagtttaaaaagctgtatgtgtgtttacaatttctgtcataaatctatggtaaccacagcacaaacattttagaaaaagaaaaaaaaaaacaactctcggttgagtgtggtggttcatgcctataatcccagcaatttgggaggctgaggcaggaggatcacctgcatccaggaatttgagaccagcttgggcaacatagcatgacccatctcgacataaaattaaaaattaggtatggtggtacatgcctgtagtcctggctactctcaggggactgaggtaggaggatctcgtaagtcctggagtttgaggctgcagtgagctgtgatctcgccactgcactcagcctgggtgacagagcaagaccctgtctcaaaaaagaaaaaaaattctattttcccacctctctaacataactgtgaatagtagtatttccttctagtttttaagtacactatttaaaaacatggaaggttttcaaataatgtacttagatttaaatgcatttttaagcttatacccatataataagcatagtaactaacagaatgttctttggagtcagatagtcttgggttcaaatcctccagacatttccagccctgagttttgcatttgttaaatagggatgataaacctggttcatagcattgctgtgtggattcactgaggtgctcatcaagtgctcagcacagagccctgtgtcatgtaagcactcagtaaatagtggcatcattttctgttttcacacacaaaaaatgagtcgaccttctgcaatcctaataatcagtaagttcttcttaatggccagaagtatacctatttttagtctatgcatttggcaaaatttcattccacaaattgtttggtggtcccaggagctgctttcaagatcttctctgaccagcttgtcgagagcttttgttatctgtgttttcctcaaagattagactcatgaaagatgtgtgaaagccaaaacaaaggaatgaccactggtgctcagagtgagagagattggtttagttgtttagccaggctatgtggctttgttcccagaccacagattataaccacaccattgtgggcaccacatatagccattttggtaaactagatatgggttgctagggacatgggcaagaaaccatgggtggggaggtgtggacctctcagccctgccctctcaagcctggccaacttcacatctgcaactgggactttgtttctgttccagacctgtttatccaactgccaacttgacagccacttggagtcctcatgagaacctcaaacttagtatgcccaaatgaaattttcagctcaccagaaggtaaccatactgtcttgagtcttacagttaccctgtaaacaaagggattaactttactagatagcaacttcctgcccataaagttaagaaaagagcccctcaatgcaaatgttggttttgcttatcaaataaatggattcttggttcttcaggatagttacagataacaatgggcagaatagccagtaaattcagtaactccttaaaattgttgaaagtattttgtgcactttctttatatcgctgcttagagtgttaattggtaaaatactctgaaggactaatacacaaacactttcacccagcaattccaattctaggactttattccacagatatatttatacatgtatgagttcacatgtacagttttctgaatttttttgtgctggcagaaaactagaaacaacagaaatgaatgaaagagactagttaagaaattattgcccagttttatagtagaatacatatgcagctgtaaaaaaagaatgagggaattattatgtatttatctattaagtgaataaagcaaaatgaagatcaccagcaaacagataaagaaattgtggtattcatacagtggaatactcctccataataaaaaggaatgaacaatgggtgaacactacaacatagacgactctcaagtactgtattcccatttgtgtaaataaaaatgtgggaaagaatgtatacatgtatttgcttataaactctatatgcacagaaggaaacacaagaaattattaccccgggaggcagagcttgtagtgagcggagatcgtgccactgcactccagcctgggcgacagagcaagactccgtctcaaaaaaaaaaaaaaaaagaaattattacctagattgtctatgcagagggaactgggtacctggcagacaggagtaggagggagacattgtacaatatgcttttttatactttttatatttaaaattgcaaaatatcttacatgctcaaaataaaaatagaatagcttatataactatgtctaaatattacatgtagttttcttctctggctattttctttttggtttttatataattttttaaaatccacttacttagcccaggcacataaatggaaagaaagatatgcttaaaattatgttatttgcaaaaacaaatatttagatgttttagagctagtatgtttttgttggtttctagtttagttctacatggcatcagactagctactctatatgatttctggacctttgcaatttgttaagatttgttttatggtcggggatatggtcaatatgtaaatgtttaatgtgtgcaagaagaatgtgtactctgaagttaggcatagtgttttctgtatatgtcaattagcacaagtctgtttatcatgttcaagctctgtgtatctctgggtttttttaatctgcatgatagaacagaagtatgtttgaaacttttattgtagttgtggatgtaatatttttcctctacttttgcagttcttgctttatatattttgagcctatattacttggtacatacatatttagaattgttgtgtcttcctggtggattgccctttgattatttaggaaatgtctctctcttcggtaatgcttcttaaagtccattttgtctgatagtactatagctacctcagctttcttttggctaggtttcataactttttaaattctttcactgtcagtctttttatgtccttatatttaaaatgtgtcaaaagaaagaaggagaaagaaagaaagaaagaaagaaagaaagaaagaaagacaccgcgatttacctatgttacaaacatgtatatgtaaccctaaacctaaaataaaagttaaatataaataaataaagtgtctcttcatgaaaactttcttagcatcattagtcattagggaaatgcaaattaaaaacacaatgagataccaccacatacaacatgtctagtataatggctaaaatgaaaaatactaacaacaccaagtattgttgaacatatggaaaaactggaacactgattatgggagtatacaaccatgttgtaaaacactttaactggtcatttacccaagaggaatgaaagaatgtatccatataaagatttgaacacaaatgtttacagcaactttatttgtaataggtaaaaactgaaaacaactcaaatgtccatagacagatgaatggatttaaaaaaaaccatgttatatccatacaaaggaatactcctctataataaaagggagtaaactactaatacacagtgcaatatagatggattgcaaaatgattctgttgaatggaagaagccagaccaaaaaaagagatatattgtatgattctatttatgtaaaattctcgaaaatgcaaaggatctacagtgacagaaagcaaattagtagttaccaggagacggagggtaaaaattaagaaggggcatgaagaaacttttttattgtagtaatggtctcatgggtctatacgtatgtcaaagcttatctaattgtatactttaaatatgtgcagttcattgccagctaattatactcaatctgtttttaaaagtaaaatgtgcttcttataagtaacaattttttaaaatgtagtctgatgacctttgtcttttaattagagaatttaatctgtttacatttaataactgatataggcagggcacggtggctcccgcctgtaatcccagcactttgggaggccgaggcgggtggatcacctgaggtcaggagttgaagaccagcctagccaacgtggtgaaaccccgtctttactaagaatacaaaaatgagccgggcgtggtggcaggtgcctgtagtctcagctactcaggaggctgaggctggagaatcgcttaaactggggaggcagaggttgcagtgagctgggattgcaccactgcacttcaacctgggtgacagagggagattccatctcaaaaggaaaaaaaaaaaacctgatatatttgggtataaatgttcaatcctactgtaggtttttttttccattttgcccacttgtttcttgttgctatagtcattacaacaatacatgtttgacttattagaatcctagtattaattagtacttttaccatttcccagatgatataatatgggctttaaaacacatgaaatccgtttacccctcaaaccttttgtgtatcattgatgttttaattctatgtatattttaaacttcacattattatcattattatatttatattgcacagtcactatcatttagatttacttatgtttacccttttggtgtatttcaatgctttcagcacttctgtgtttccctttgggattgcttttcttctgcctcaaaaactctccttactatttattttagtatggctctgctggtgataaattctctccatttttgtttatctggtaaaatatttttccttcattacttatgaagaatattttcactaggtagaaaattctagattgttagttattttatttcagcactttgaagatgtcattgcattggtttgtggatttcactttttcaattgagaagttaattttgttggttgcattattacactttgaagataatgtgtcttttccctggatgttttaaagatttttctctttgactttcagtagttctactatgatgtgtctaggtttgatttcctctgtattgattctgatgggcatttatagaactttatgaagctgcgtctggtatttttgccagccagtatttctttaaatattacttctgctccagtttcatctctcctcctcctttgggatccagcttacacaggttacatctgttactttatgactcaacacacttttctggaaagactctcttttctttaaacacaagacactaaatggttacaggtgttcttttaggtgattatgctgcttcatcagcagatggtgattatatcaagaaggaaacttatatgatgacatataaaagctggggagaggagatgtctctgaagacagtgagaaatccttctctagtcttgctgctggaaccctcaaacacttaagtcatctaataaacattctactgtcttcagaggaattttctcagtgaaagggatttgggacacccctgtgaggaagaaacataagttccatgccttccaaataaggggcaaacttttctttgtagtcatgtttccacctgttgaatccgttttatggaagttgtacagttatggcttgtctgtttatgagaagagatagagaatatgagaaacgataaaacctgaaataatccattgtgaggccacaggctgaagaacttacaaggaatttattctagactttatggctgaaaatatgtatgcatatatgtatatgagtgtatggagatacagttatggatagagatctatagatatatgtgtagatatatagatacataaagtttgctacagaaattcattttgtacacttttaaaagtgcactttactaaaagcatccaagaatgcatctcagaaaaagccttagatttcttttatgtggtcaactccaggaactactcactcttgagatagatgtgtgttttcagagcttatccatgccatgcacaatgatctaaccctttgatagctgcatcattcaaagtcagtttttctacatgcaacaaatttttaaaccttgatttttatttatttatttattttgagacaaagtctcgctcttgtcccccaggctggagtgcaatggcgtgatctcagctcactgcaacctccacctcccaggttcaagcgattctcctgcctcaacctcccgagtagctgggattacatgcacctgccaccaagccaggctaatttttgtatttttagtagagacggggtctcaccatgttggccaggctggtcttgaactcctgaccgcaggtgatccacccgccttggcctcccaaagtgctgggattacaggcttgagccaccgtgcccggcctaaaccttgatttttaaaaaaatactaccctgccctaaccttgtaacttaggaagtttggggagaggggtgtgtaacaacctttcactgcttatttgatgtaaatcatttctagtcctgaaacaatggctattttgcaaggtttaattatactgtgtgttgtggttgcatgcataggtacacccacaaatgtctgtcattaatacgtatcactagctttgtactttacactgtatttttggagtgttttacagtcgttcgttaccaagagtaaattatatatttgcttttctttaccccacccctttcactattgtttaaaacatgtcagattcaggaaaacctcaagagacccaaacctctttcaatacttatagacaaagtttttttttccttaaatcagttttaaaatccatccagccattttggctgccggccataccagcagataatgaaagaattttccttgagggtcaaaagccagggagaagccttccagggctgtttggtttcctagcacagctgctggagtagctcgtggtgctgattgatctgcttggagattcttgtgcatcttcacctgttagagctggaaagatgctcaggactatacagcccagcccttctggtttacatataatgaaactaaggcccaccttagtcaactaatgtgcttaaactcaagcaaatggcaaatggcaaaactcaggactctgtcaatgagttttcattctttttctttattcttctagacacatattttataaagaaatgaggcagcatgatgtttaaaatacttaaagtgagaatgagaaaaactgatgtctacatatcatgaaatggttaaaaagtttaacgtgcattgtcttctccattagaacttcttttacgaatttttttctcaaaatctggctcagaaatcttgttttaaaagctccctaaacattcctaggcagaattagtaacgccttcctctttgctaacaaggaactgtgcatattcctgtaatagaatacttaccatattatattgtaagtattaaattattcatctgccctcctcccacctacccactggatcaggcttcccaggaacagcaacagagagcccagcaatttgtgtgttctcagtgtggaatgaatgaatgaatgaatgaatgaatgaaccaaccattccttcacagtcttgcactatcagtgaatcttatgctttattgaacataaaaatcacctggaattgctgacttaaaatacagttttccaggctataccacaagagatgctaatacaggactggggtaggtccaggaattcgaatttttatctaagtagctgatgacttaatgcaaatgatccagcagccacactttgcaagctctacgctatgattagttgtggtttgtagtcccaattgtatatcataattatctgctgatctgaaaaaaacatagagcttctctacccactccttaccaccagtccatcaccaccattctgactccttagtcacaatgggtattgacattttaaataaatcccaaggctcccttccgggagaataaagaggataatatttataaactattttgagttccttagaagaagggtatcttagctcattaaggaaatattatcatgatataaatctaacatcatgaaacttatcttggacatgtcaaatttggtctaagaatcaaatgtagaggaaaataaaacccacacacagtacctgcatggaaacggaacctgtgcaaacacctgctttggctatgttcctttttgtggagacagatgtcccccttcactaggaccagggtagagatgaagaaggttgatttggacattggggtgctatatgttcttttgggactgaagttccatattaggaaacttaatagctgacatttacataacttttaaacatcccaagtagtacgctctgtctgcacactattttatatgtatgcaatttgtttgtttttgtttttgttttgagacagggtctcactttgtcacccaagctggagtgcagcaggcatgaacacagttcactgtagcctcaacctcccaggctcaagcaatcctcccacctcagccccctgagtagctgggactacaggcacacaccaccatacctggctaatttttgtattttttgtagagactgggtttcaccatgttgcccaggctggtctcaaactcccgagctcaagtgatccacctgctttggcctcccaaagtgctgggattacaggcatgagccactgtgcccagccatatggatttttttaaaattatgaacttacataacttcacaggagacagacctgaatgaggtagttattaaactactttctgactatggaaaggatttctgatccttgtagtatatttccacgtatattgttatactgttgtgtgtttgtatttagttgctcatactattttttactgtagcttactttatatgcaggtttccatgggtcaacctaatttatatttttgtcattttaaatggaaaaatgatatcccatatattttgtagtattatttgttcagtgttctttccaatgtgggatgctttggttatttctaattatttgctatcatgctatcatatacagaattcttatgttcatttctgctcaaaattatatttttgtttgtatgaattccacggtgtatatttcccaaagcgagatagttagataaaagagtaacagcagtttcatagttctggttgcatattacagtattactttccagacacacagagccaatatacaaccccaccaggggtgtgaggcatgctggttttcccacagcttgaccaacatgaaattttatcattccagcctatttctgctagcttaatatgtgtgtagggcctcactagagatattttattttgaagttcttcaaatgatatgaagcaattcttttccacgtggaatgattcactattttcattttaaggacaaaccattcgtttgtatttgacagttttgaagtgacaggtttaattgccttctgtataattgattctgtagggagagaaaataggagtgctattaggtattgggttaggctcaaagagtcaagaaagaagattagttgtgtagttctgaatttggaaacttgtatgtggacgactggaacagaaataccagttgaccctgtttaagaagggctagagagcaggaacattctgatttcatgatgacaaaaatactagagttttgacataggacaacagatcttgcttcaaaatgaaagcaagaccctatccttcctgcctctttgatcctctcacagtgccactttctttcctgaacattttcagatattcttatttcagatagaccactctggtgtataataggaccagttttagagtggccatgaagctaagacatgttatttgagagctcttaggggaagacctggacacagcagtcgcaggagaagtcagtcttatctgtaaaaaggtcagcttgatcacagaaaaaggctttggcttggttgtgttggccctccatggcttatgatcctctttcaagtaagcaaataaatgattgcagtgttggtttgagtcctgtggtgccaaacacaagacacattgttgctcatgcaatatagacctttgttttggacagtggtctaatctgctggtttttaaaacattggtgactgtccaacttataattaaaatcagtctatcaagcacttggagacaaaatctgaggttattctttcattcctagttgtcacactaattttttgccttcacttttgtctctgtagaatatttacacgtacacctatctatatctatttagatataatttatatactacaaaattcacccatgtgtacagttcagtgatttttaatgtattcacagtcatcactacaatcaatttcagaacattttcattactccaaacagaaaccccaaactcattagcagccactctccatttctctacaatatccccaaccttaggtgaccacaaatctactttctgtctgtatagattttgcaattctgggcatttcatataaagaatcatagaacatgtggtcttttggtttagcttatttcacttaggataatgtttccaaggttcatttatgttgtggtgtatataggtactcttttcctttttattgctgagtaattttccattgtgtggatatacaactttttgttaagtcattcatcagttgatggacgtttggattttttccattttttggcctttatgaataaggctgctacgaacattcatgtgtaagtttttgtggggaagtgtggttgtctttttttttttttttttttttgcaacagagtcttgctccgtcacccaggctggagtgcagtggagcaatctcagctcactgtgacctccgcctctcgggttcaagcaattgtcatgcctcagcctcccaagtagctgggattacaggcacacgccaccacacctggctaatttttttgtatttttagtagagatggggtttcaccatgttggccaggctggtcatgaactcctgacctcaagtgatctgcccacttcagccccccaaaatgctgggattacaggtgtgagccaccacacactgccagaagtatgttttcatttctcctgggtaaatacctttgagtggaattgctgggatacatgggagctctgcttaaatttttcaggaactgccagatggctttccaaaatggctgcaccattttatactcctaccaacagcatatgcgtgctccagtttctccacatccttgcaaacacttgttattgcccctctttcttgttatagccagcctagtggttgtgaaatggcaactcattgtgatttgatctgcatttcccatttccctcacggctagtagaatacttacttcctatcctagtttttccttatacttttaaaaaattaaataaagaaaacgctgtagaaaattaaggagcaaaatgtatgcttgcagctacagcttcctctggggtttcacacttccttgcctcatcatgtaacgggccaccactaggatgaaggtgctccagtcttattcttccaatcttctctccatttgtcattcagaatcctgggaaagagagacacttgtcctgccgtgagttatgtgcccactcttttgatttgtgtttctgcctagacagtgcacagcatgagtgttggcatcttgaaaggaaactggggtgctcctgagggagaatagatgccaaagttgggacaagagcccagtttcctgcctttctaggtgtaactcattgccaaggtcgggagcaaagcaaaccatgtaggaaacctcatcatgctgggtagttaataagtatgccctagcacacgttttcacagagaaaacataatacgcttcatttgtaatatttaagtattacatctaaagttacaatgtttaaaaatttatatatacccttgttggatacaaagcatgtttaaaatatgtgacctcatttgatcctcagtaatctctgttagtttctaattatattcagtagtggtattggtattgtatgttttggcctcattgtggtttaaatacacttttgtgaactagcctgagaatccaaccaccaacacaatgatgtaatgagaaaacgtgctctgagttccaaacaaatggctaacagataagtgctcagaagtcaacctttttgtaagctggggtatcactggccagcagtcacatgccagcaggtgtgagtagacagtggggaacaatttcctctcatgtgtatggctccctaaagtgttggctgagcattgtccacatgggtgatgcaaaggatcactgaactaggagcagttgggaaaaaatacaatcattgggaattcctgtagcatcgaaggtgcctacagggaggtagaagtattcatacaacagttctctggtgttctctgttgtagcaaccagtcagccaaaagggttcagctgcttgaaatgagaatggctggatcaaaatggcagctcaggatttaaaggattctagtcagataccagacatcctcacatagagaaaactctgaatggctgggggagaaggagtcaaatgccctggatctttttcttgggcctcaaagtcctccttctgtcatcatccttccagtattgggcaggacctgactgcaggcatcatggcctctgtgaacttctcaagggtatgtattatctgacaaaaactacgatgtccactaacaggccactgaaaaggtatcttagtcagttctgctcattgcccagccaaggcctacgttttataacatgatatcaaagattgcatctaaaattgtgatgatttcctaaaataatcatttcatttagatttttctattttaatccaaggtattcttcagcggaaataaggaaacagtttactctcccaccaaaccttggccagtaccatcgacagagcataagtacctctggcttcccctctcttcaactagtaagtatgagttccaggtttacttagcgattggtcaagtgcaaaagtgcccagggtatgtgtttgcctcctgttccttagatcttcctaccatcacctcacattctccagtcaccagatcctaactctgtgactgtgtctggacatcagacaatatccctctctctctctgccaaccggtacttagggtacataatagaacctctgggagctgtggttttgatgtctctagactaggtgggcttccaggtgactcagtctcatccaaattatggttcatatttgggggagaagggctagcccaaaaacttaccaccatttgtagtatgcatttttttggaaaagcatattccaaaatctgaaatgccaagttacagacctcctttttgtaaaataattttcttgctagtataatttacatataataaaattcacacattttaggtgtacaatttggtgaacttgggcaacttagagtcacttaacctttcctcagtcaagatatagaacacttcttttatcctaaagcgttccccagcgcgcttttacaatctcctctccccaggccacaccctccaactcacgcaatctctgactcacttctgtcaccataattttgctctatctggagcttcatatcctgttacagtatgtacaaaccttctttttttgagacagggtgtcagtctgtcacccagcctggagtacagaggtgtgatctcagctcactgcaacctcaacctcccaggatcagatgattctcctcccacctcatcctcccaagtagccgggactacaggcgcatgccaccacacctggctaatttttgtactttttgtagagacaggggtctcgctatgttgcccaggctggtcttgaactcctgggctcaagcgatcctcctgcctcagcctcccaaagtgctgggattacagtgagccactgcacctggccctaaaccttcatttttaaaacacatttcctcttaaattgaagattgcctacatttttatatcaatgccaattgttgagtgtgcctatatgtgttatattatttgagcactaaatgccagatgtgtgccaagtgagataaatctgacaaatgagatggtttgtaaaaccagcagtgaatattcacttcctctgtgagagagctccagccctcctgtactcacttcctcacacagcacagcagcactcttgctggttctgctgcttatcttgaagaggttaggttactttttgtttctacttattacttcgaaaccacttctgccttagaaattttgtaaccttccgctcagtttccggtaaccgccattttgtctcctgtaacaatttacgcgccgtgtaactgtgaatctttcaaaggtatgttttactggagtgatttctggttatttcagaaggataatttgtgtgttgcgtcattaatgaaatagtagtacgaaaaacctatagcatcttttactgcaggaggtaactttccatgccattttttcagaaaatctacttatgacttcagtggcttgctagactggcctttttatttgtacttttcctgtgtttcagaattgcagagtataataaaggcatgtcaagtgcatattgtgtccattttcaggtatattagataagctttacaccaagataaattagatatgcttattggtttaatttgtgctaatatatatttaattgaaaaatcaaaaaaatttttttaaattgactgaagttgtattccaaaacatgcaaaatttagtttaaaatagattggatacacttttaaattttaaacaaggtagagggtttagtgctttgcttttttaaaaagtaaatgaaggctgcagctttctgcagtagttgtcttgggaagtagtgtggacatcactcctaagagacgttaaggaagtttagctaacaggctttaaccctttctctccataccagcttttactcttttttttttttttttgagatggagtttagctcttgtcacgcaggctggagtgcaatggcaccatctcggctcatcgcaacctctgcctcctagttcaagcaattctcctgtagttcaagcaattctcctgcctcagcctcccgagtagctgggattacaggcatgcaccatcacatctggctaattttgtattttgagtagagacggggtttctccatgttggtagggctggtctctaactcctgacctcaggtgatccgcccgcctaggcctcccaaagtgctgggattacgagcatgagccaccatgcccggccaccagcttttactttaatgccacagccttaaattttctttcaggagaaattattttatgtaaagttacaaaggaaaataatgcttaatatctgtaagcattcgtttggtaagtttgctgcctcctcagtaagttttgatgaaagtgaattttgatgaattactaccttagccgggtagtgacgttaacatgtggcttagctgtccattttctaagatatcaagaaaccagcaacaataagtaaaattgttaaattatgcaagaatcacatgttcctacctgtcatcatttagtcttggttctatttgcatgtgaatatcctttagaatatattactcccagttattccgctttacttttctgaatctcttttcccatctcttgacttcaacttcagtatatggctcttgttccttctacctggagaacggaggcatgtggaagcccagaggattgaattcttttttttttcttttctttcttttctttttttttttttagatgaatagtctgcttaggaaatccatctccataatgtttacctggtatcgtgttgtaatgtcagaatgaagtggctgttcttccccttgagtcatcgtcccgaatgaaggttccccaaaagaaatcatcaacttatgtggtgatttccttttacctttaaaaaaaaatttcttttcatggaaagataatggaacatgtcggtaagattcatttctaggaaggcaaaggagtagtttatcatctaaagactctcaacctaaagctgttttagaaaactttccttaaaatgagaagccgtaggttttcgttgcattattttggctaattgaaaaataagaccaagtgcgttctgaccttcgtttctcttacctttatttttacaaccaccatttcaatggcccacttgctgatacaaatgattgtttaattttaaaaagcatttaattgaagtcaagttatttagaacctaatcatttacacgtctttgttgttgctgctgttttgcaagagtgaagagcttggagtcaggtgaatctgggatgaggtacagttgtcatttattagtcatgtaatttgtgacaagccacttaatctctctgaagacttcagtttcttcatttgtaaaattggcataataatgctgtccctagtagggaatatagaattatataatgggtcctttgtatatattggctagtattgctctcttacgatttggcactatggagacactgtgggagattaaaagaagatgatgaataaaaggtgacttcagctctgaagggctttatgatccatttgggagaacaggtaatgtagaatatactggcttcaaaagtggcaggtgtttagaagagaaaaggatacatgatgtgataggaggcaaaggcttgattgagaaggctgagaagacttagagtaagggttctcagccctgactggacattaaaattatctagggacaattcaatcagaattcctgggggtggggaccaagcatcagtattttaaagttccctggggactttaacttgaagcccaggttgagaatcatttaaacagctctgttatttatttatttaaaattttaatgtattttttgagatggagtctcgctctgtcacccaggctggagtgcagtggcgcaatcttggctcactgcaactcctgcctcccaggtccaagctattctcctgcctcagcctccccagtagctaggaatacaggcgtgcaccaccacaactggctaatttttgtacttttagtagagacagggtttcaccatgttggccaggctggtcacaaactcctgacctcaagtgatccacccacctcggcctcccaaagtgctgggattacaggcatgagccactgggcccggcctagttttactttttttttttgtaatggaatttccctctgtcacccaggctggagtgcagtgatgtgatttctgctctctgcaacctctgcctcctgcgttcaagtgattctcctgacttagcatcctgagtagctgggattacaggcagctgccgccatgtctggctaatttttgtatttttagtaaagacggggtttcgccatgttggccaggctggtcttgaacttctgacctcaggtgatccgcccgcctcggcctcccaaagtgctgggattacaggcttgagccactgcgctcggcccatttaaaaaaactttaaaggtagacgtattccaaatggggggaatatataaagaaaggtaacacttattttgccctgtgtgctttgaatttcagaaggtgtagtaagcaaagaccacttactaaccctacagatatatccttagaaaatacagtggtttctgtcataaatctgataaatcagatgagaggaagggtgtatgtttgatgttgatttttctttttgttttattggggtttttaaaaactataaatatcaggtctgatgactatgtgtataaacattttctaagtagataaaatattttcaaattttgcattttttagtatgaaggggatccatcatttgaagttggttttctagatgtgatgataaacttgtcccaggtctatttgacactcctaccaaaatcctttgtgaccagggctagaaggcagctgtggctagtaaataaccctgtgtgtagactcacttattggctttggcattctctattgccacagctgtgtgaatagattaaccagagaccctctggtgccagccacctattcaggcaaacaagtctataatcagtacctctgttaaaatgaaactgtaatatactattgtcttttcatttatttatttatttatttagagacagggccttgctctgtcgcccaggctggagtgcagtggtacaatcttggctcactacaacctccgcctcccaggctcaagcgattctcctgcctcagcctcccaagtaactgggaccacaggcgcaccattgcgcctggctaatttttgtattttttttgtagagacggagtttctccatgttgtccaggctggtcttgaactcctgagcttcagtgatctgcctgccttggcctcccaaagtgctgggattacaggtatgagtcattacacccggcctattttctgattgttcaaagtagaagccaggcacaatggctcatggctgtatgtaatcccaacaatttgggaggcagaggcaggaggatagcttgaagccaagagttcgaggccagcctaggcaacatagtgagaactcatctctacaacaaagttaaaaagaaaaattagccaggcatggtggcacatgcctttagtcccagctacttgcgaggctgaggcagaaggatcacttgaactcaggagttggaggctgcagtgagccatgattgagccacagtactctagcctgggcaacagagtgagaccctgtctcagaaaagaaaagagaagagaggagaagagaaagagagaagagaagagaagagaagagaagagaagacatacaaaagaagagtaacatacaagagaagagttaggagaccctgtctcagaggaaaggaggggaggggaggcgagaggacaagagaagaaagagttaggatctatgccctaaggaagtaaggaggatttgagactgtgtaggtggttaataaccttaagctacatattttatggagggaaaaatcctatttttaaaagtgagaatagaacaattttgaagtgaaatggaatgaattagctggaccataacggctctgactgaagaaaaggatgtaaaaagccacatcctggatatgtaccaaacaccatggttacatggcatgtttgtatatgtaacatttatttaaaaaaaaagtctcatagcttagaaggcatttatttttgttatgtgtataggcttctgtgcaataaagcagccttttttattttacagctcatgatgacttaaatggttaattgcctgataaatatggtcctcttttattcttctgattctgttgttcttttgcacttcatctttcaaggggttgggctattcttaggtttcactgattgcactggaagggacatgacggaaaatgaagatctcaagataattttcttgcaaattcacaatggaagataaaaggaaagagtggcaggcattctgcacacagagcagacgtttctttattgtcattgttcagcagaggaatcaactcagccttggtgaaactagagtgatgcccatggtggcatgtcagcatctccctcttagtggcatcagtgctagattgttgttgttggaagcaggagagtgtttagtccataaagtacagaacttcgatatcacagaagctagaagaactttactgccttcagcttcgtttaaagatagtagagagcttactcattcgttttagaaatatgtattgggtctctatgtcaggaactgctggcacagcagtgagattgaagatacaacagtgaatacaatagagggcctatcctcatagagtttgcctttcagaatgagggacagacgcagacaaatagaaaatgtcgattgtgtcagggagtattgagggctttgaagaatgaaatcgtgacccagaagagatgcttttagattggatcatccgtgaaggcctctatctagaaaggagacacttgggcagaattctgaatgaacttgacggacatctgaaggaaaaatattccagtcagaaggaacagtacgtgcaaagtccccaaaacttcaataagtgacgtgctccagaagcagcaaggaagcagaatgaggcctgaacagagtgggcagtaggaaatgcagtcatagagaaagcagggctgggtcacaggcctcagagactgtagaacattggctcctactctaagacaggaagctgctgtgagcattgaggttgggcgtggaaccatttgactttttatgaggatcactctggctgcagtgtggaaaatagactggacgagggagggcagttaggaagatgtcacggtaactcaggaaagcaataccggtgctttggacgagggtggtggcagaagagaaagtgagaagtattctggatatatttcagaagaaagtggataggattttctgatgggtgatatgtagagtgtaggagaaagagaagaagcaagattgactttaatgttttccacctgggcaattggtggactggaattgccacttgcagaagtgtggaggtatggaaggtatgggaagagcagattgccaggaaagttgagttagttttgaactcattgtgtttgagaggtctgttaaattatcaagtagtgatgttgaggtgtaattggaaaagtcaacctggaatttatggcagaagttgaggctgcagatataaacttgtaattttaaaaatgtatatttaaagccatgggagtgaatgagttcatttgagattgaatgcagattgagaagagatttagaattgaactccagggcactgcatagcaggaggaaaacctagtaaaagtggtatctgtaaaatagaggaacgaactgtcacaatttgcctggtactgaggattttctcagtacatgagactttaagagactgggacaccctgagacaattggttgccttccatgggaagaaagtatgtcaagagggagagagtgaacaactgtgtccaataaaccaggactgagcaaaaaccattgaatttggcatcatgaagtcttaggtgactttgacaaggcttgtctgttgtgaacagccaagtaaatgtgaggaccactctccaaaaggtaaagaaacatgcatgaggatacaggtgcgccagctggagacatcatgcctcttccccgtccccaccaggagtggcgtgaagcctccccagtgctgtaacgaggcagccaggtcctgtgtgactgcacatgtgacttggggcaagtcatttaacctctctgttttcactatcctatttgtgaaatattgtttagatttgtggtttgagtcagctatctgtatactacactgtgttaggagctatgtagattaattttcaacagatatggttctggggttgtaggaattttcaatttgagaacaaattgaatcttaccctttgtcaggagaaatagcctttgacatgtgttaggggcaagggaaatctcaaacttgcttaattttaaaaatgaatatttggttgtggataatttaagctttggtgatatttctaattattttttgtgtgtttctagtctactgaccagaagtctgaaaaaaacaactaaaaagaaagactgcataagccttcactagagaagtattgaaaattgcttgagggaagtgacggtttctttagcctagtgtctgtaggaccccagtgtagtgtttgttgaatgaatgaaaggaggcgtatcagtcaggttcactcagagaaacagaagctgtaggaaatccatatggatgtgtgtgaaggtattggcttgcctactgctggtgtgtggctaagcgagcttaaaagtccgcagggcagatagtcaggaaggaaatattcccaacagactgagctcccttgggcacaagctgaagcctggagtctgaactgccagagagcctctaccttcttagaaaaggcttcccactggctaagtcaggcccacccaggggaatctctcctttgattaacttaaagtcacctgtttagggactttaattacattggcaatagtcccttcacagaagcacctaaatgactgatgatgtaactgaaaaaatgtgtgtgtatgctacaaaatggctgcagtctcccttctgtcctccagctcttgcaggagaactctcttgtagctcaccctgtctgaaaacatactggaaaggaattcaaggaaatgtagttcagcctagccacgttgacacatcatgaagccgtcacaaaaggtaaagcctggtttaggagcatttgcatttgcagtcttaagtatttttgtcttatttttcaaaaggggttgggcacggtggctcacgcctgtaatcccaatactttgggaggccgaggtgagtagatcacttgaggccaggagtttgagaccagccaggccaacgtagtggaaccccgtctccactaaaatgacaacaattagccaggcgtggtggcgcatgcctgtaatcccagctattcaggaggctgaggcacaagaatttcttgaacccaggaggtggaggttgcagtgagccgagatcccgccactgcagtccagcaacggagtgagactctgtctcaaaaaaaaaaaaagtagttttggtttttaatttttgattttttcttatgttattacatataacgaatgatatgcatactctgaaaaatcatgacataaaggtgaccttgaaattactttgatgttcatttaaactagtctttggtctccactggctaggagaccacatatagcagaacagcagagaaagcaaaacagttaattttcatgtttggcttttgagcttccagggacccaagtcttgccttgaaccgatcttaggaaattcctcattccctacccgaccctgtttctaaactgcatccctgctgaaatgcaatgccactgtaactctctccaatatttgttttcttctttggcttaccactagatgtatgtatatatgtttgtgtgcctgtgtgtgtgtgtgtgtgtgtgtgttgactgcctcatagtaaagcctactcttgagattaagactcctgatagtttagagaacagaaatcttttttagttcctggttattacttgaatttgcaagaggaacaactgctaggaggcctagttaacagtagttagggtctccacccacttgccaagggcaagactagtttacaccacatttggaatgaccagtttcctcccactttagtttcagtgtagaaagagtaggggagacgaactattcaatgtcagcttgggtgtagtgccagaaccgtactcagtaatgctgtcattgctgttggtgcttaccagctcttcagtactggaatagcttcagacctcgagagtttatgactttatcatcaactgggtgtgttgcccttggcacattgccacacagtgcttaatgatgatatatgttctttatcaaattccccccaccaaataatggcattatttacgtgtgagaaagttgcacatttcaccacctcatggtttattagagtgcaattccgtgagaacaactgcctgtgatcctctgtatccccagtggccaactcaggagctcagtatgccctacccagtagatgctcagaacatcattgctgagtgaggaagtcagccatcattttctccctggatagtctctcctgtagataacaggggccgttatcagccaggtttttcatcatttgtggctttgaatttcagggacatgacaagtttgctttttgtttcgttttgttttttttttttttttggttttctagagacagggtcttcctgtcactcaggctggagtgcagtgatgtgatcacagctcactgcagcctcgaactcctgggctcagtgtttctcccatctcagcctttggagtagccagcagtataggtggtgtaccaccacacccatctaactttaaaaaaaaaaaaattgtaaagacagagtctcacttttttgcccaggctggtctcatactcctggctcaagcaatcctcctgcgttggcctcccgaagtgctgggactgcaggtgtgagccaccttgcctatccaacatgacaagtattattctctggcaggaagtgaaattttttctcactgatgattgcacacaaatgtcatatctccatgaggcttctactcactagttttacggctcatgtcaccttgcttcaaactatgcttcagtataattttgaagtgtatatttccattgcctctccttgagtaattgatattcttcacaataagtttacatttattatcacttttatttacttactattattactctgagcagccaatcttatgagaagctcagagtggaacgtgtgggtcctggtaaatatattatttgactcacttccaaacacacttaatattgcctggtgttttgattatttcaaaatatacagatttcttgaaaggcctgcaaaaggaaacaatcaaaattatagcggttaagaatgtgagtctgccttggtttgaattccagatgggccagtccctagctgtgtaatcatgggaaaattattaaatctctagcctcgctttcttcatctgtaaaatgagcatacaggctgagcatccctagtccgaaaatgcaaaattcaaaatgctccaaaatctgaaactttttttgtgcctccatgacgccacaagtggaaaattccacacctgacctcacgtgataggtcacagtcaaaacattgtttcatacacacaatacttttttttatttgtataagtttaagtggtacaagtgcagttttgctacatgaatatactgcatagtggtaaagtctggacttttagtgtctccatcacccaaatagcatccattgtattcattcaggaatctagcatccctcaccccctcccatcttcccacctctccaagcctttcatgtctagcattctgtgtccatgtgtacacattatttagctcccacttctaaatgaaaacatgtgatatctgtctttctgtttctgagttttttcacttaagataatggcctccagttccatccacgttgctgcaagagacatgatttcattctttgttatgactgaatagaattattcaggcacaaaattattaaaaatattgtttaaaattaccttcaggctatgtgtataaggtgtatatgaaacataaatgaatttaatgtttacatttgggttccatcccgtggatgtctcattttgtatatgtaaatatgacatgatatgaaaaattcaaaactctgaaacaccaattgaactcaatttgcagtaagaatgcatacctcacagggttatagtgaggattgaatgagacaatcctagtccaatttctttgcacatagtaatgctcaataattattacttaaatgggtataaactttatagtaatgaggttggggctggaaaaaatgcagtttcataatttcctatagaagtcattcaatcctgactctaaactctgtattccatgtggtggttgggtggcgtgggagagtcctctttatcctgtggggttggtcctatggaggtgtctgtggcagattggcagatgcatttgtcttgtgcatagatggtgtctgttgtttcctctggcagagttcaccagtgtcctaatgcaaacttagtcctcatctggctcctgcacaggctgatctctggctcctttagcccctcatggttcctgttgtttcattttcagagggacccttgtaaggactatagtcctctcttcagctgaccttcaggtccccagtcagaaccaagggaaccgactctgtcccttctcatagcacctgaaaaccccgggaaacgaggggaatgctttgctctcagctactgaggttgtcctgtcaccttctcttctgccctcctttgccatggcataggataatgtaagtcagcaatctcattactcggtatatagccagaggaatataaatcattctaccataaagacacacgcgtgtgaatgtttattgcaacactattcacaatagcaaagacatggaatcaacttaaatgcccatcaatgacagattggatgcagaaaatgtggtacatatacaccatggaatactatgcagccataaaaataatgagatcatgccttttgtgggaacatggatggaactggaggctattatcctttgcaaactaacgcagaaatagaaaaccaaatgctgcatgttctcacttataagtgggagctaaatgatgagaacttaccaacacaaagaaaagaacaacagacactgtggcctacttgtgggtgaagggtggtaagagggagaggagcagaaaagataactatgtggtcctgggcttaatacctgggtgataaaataattgtacaacaaacccccatgacatgactttagctatgtaacaaaccttcacatgtacccccaaacctaaaagttaaaaaaaaaatcccagacaggaagtagggcatattttgcctaatttgcagcttcatcctcactccctaacttacgccactcatgtctcctccatcatcagggacagcaagagtggggaggggacgaggcctgccacatctccattctctgatcttatttcctcttgcctcttcaacagcgctttgtctctcctctccagcttgaagcccttactctggtatgtgatttcaaagcgatgaaaaactggtttcgttagtacttcccttggatctgcccttgtctcccatcaaggcagtgcaagtaaagaatccaagatatttgttttgttggtccactggagggtagagatagagaaaaacagtaacttccccaccacccccaacctcccttgggctgatgactccaaagactgccataaatgaacacttcatagagctgctattaatatgacacaaatctacttgatctaagggattcttttactttcttagggtggtcattcctaagtctttggatttcacagaaaagaaaatatattttaattgaggactgacaaaggttgccaactttttatcaattataagaattgtttttataattaccatcaatttctattatttcttttactccccctctttccaactgtggaaggtaaaattgaagagcaaagaacacttatttcaaagtgagtaaatttagctatatgaaaactcagcagattgccctgagtttccttgcgtagctgcagtccagtggaaatttcttccagaccagcaccagtcgccccagtgacatttagaaatcactgccctggattgtttcagccaccgaaacactcggtgttcactgtcagctatgattatatatgaagtgctttcgagaaccaatgtatagcataacttaggccaaaagaaacactgtgcctaaacactcagccaaggagtgttgagtttgcctggatttctggaaaattgtctccgttccctagttcactgtatttgggtaaacaaaacatggcctcggagagcctttgcgggagaaattataaaaattcagcaaagctttgtgatctcattttggatctcctcaggattcctcatcaagttgcaattaaggagagaaaaattccgccttggggtgggattttaattactcatcatgttatgacttgactttctgtgctgcatttttttccatatcactacttctgtgtttgacagctcctccaaagagtcgctccgttttatgccaggagcgaagtacttactaagtcaaaggaaagcaaggcaaacatctactattgcctttgtgcttttaccagaaaactgggtgagaacctccttttccttttccctgcccctccagcctcagttttatgaccctgtggagccagtggactttgaaggacttctgatgacacacctgaacagcctggatgtgcagcttgcccaggagctcggggacttcactgatgacgacttggacgtggtgttcacgccaaaggaatgtaggactttgcagccctctttgccggaggaagggtaaatagttttctaaaatgtagatgtgattgggattgtcatgattgttttcaataagtgggtaggggagatgccttcaatctgaacttaaaaataaaataaaattactcaatccattcaaatgtgtgggacagctatatgatatcatcatgtaagtatagatagtttttaaattagtttggccagagattttgaaaagctatgtgaagactaagccagtgcaagggatgcaggaggaccaaatgaaatgctcaagaggaggttaaaagtgcaggctctggagccagaccacctggctgccagctcagtgaccttggctgtcacatgacctcccaaatcctcggtttctccatttgtaaaaatgtcaagatttttaataataattactgaaatgccaccatccagaagcattttaattgcttacagttatgagactggatcaagttagaaacataaggtaaacccacatttattgagcatctactatgttctgggtactgagataaaaagatgaataagtcaaagtccctcctttaaagaaagtgtcatgcagtgctaaaacagtggggagagctctgtagaataaatatgtgaatagctaattagggcttgagtttctatagttggctcttctatatgtttataggcttgggcattagtttttggcatcaaactaactgtggaattgtagctaaatgaaacgcctgttgcttctaaaatgtaaaaaaaaatgtctctttggaggtttaggataaacttttatttacatttattttaaaagccaaattaagattcatatcctcctggacaggttccatcttctcatcttccccagaaggtcccagaaagaagatcctgacacacagcccctgccctctttactctgagatattctagttctattttggattttatttcatcacagtttaaggaggttggatgataatgggctggtattattgtgaaccgttgctctcttgttcagacagtcctcactcacataggagaactgaccatatgtgtagctctgatgttttaaaaatacacacttcccaggaaagaaaaacattgtcatttttgggaaacatactcccccattttcagtccatttattcaggtatgactttagtataagttaacacctactatttcatctttagtgaagaatcatttaatttattcctttatgtaaaatttatggatgtttccaaatatggtcagaatcttggaaaaagctgtttaaaatgcttacagtagccagtcaccgcagcttgttcctgtggtcccagctacttgggaggctgaggcaagaggatcacttgagcccaggaatttgagttcagcctgggtaaaatagtgagaccctgtttcttacaaaacaaaaacaaaaaacagtacaatgaatttagaggaaggaggaggtttttttttttttgaaatttgataaggaagataatttctttacttagcatcagttttttagtatactgttgccttgtcaaaagaatttataggtaacatacctgtctgatgtctttaagacagcctctactatttcagttgttgccaaaaagtcttctgtataattaaggcaggggaaggtatcatcatcacaccagagtaaacaatagctgactcctgttgaacaacctgtgcctagcccagaactttatgttgagctgtgatggcgtggtagtgaaaaacatgaacgctacaggtgagctgcctggattcaggtccctgctccaccacttgctgtgtgacttggaacaagatccttaccatctcatttttctgcaaagtgagaataatagtaatgcctgccctatggtgctgattgagaattaactgaattaatacatataaagtgattgcctcagtgcataatgcacagtaaatgctacctaagtgtaaactattaatatcatatatgcgtcttattgtgtgccaggcagtcttctaagcactttgcacactaaccgatttaatcttcatcaaagctgtctactaaaaggggcactcttactactctaacagctttaaggagaggaaactgaggcacagaagggttgagtgactggcttatggtcacatagctataagcgatgaagctgggatttgggcaattagggcccagagactgcatgtgtaacctttacaatattttatctaatactaacagcatgtctctgttcttacctccttatcacagatgagaaaattaaggcttgtagcatttaagcctgtttatttctggtactaatgcatttgcaacaatagcaaaaagctttgctacaattgttatttttgatttcaagactctgaagcacttgaagagtattgctcatggtgcattccttaagtagacatgacaggaaccaactgaattaatgatcaccaacaaaagccagtgtttgcaatttcatcaaagcataagacaactgttctttttcctggctttcaaaaaggagaacacgcgtgtcctaacaaggttacacatgcataaaaaatatgtccaaattaccctgtcagagataggtatttatacttattttccttgttttgtattcgaatacagctagttctacctgtcttgtgtctgaatgccttcggggatagttataatttaacatgattctgtataataaagaaaacccacaaagcaaaaaaatgccaacatgtttgtctcatcaaagtaaaaatgtttattgccccaggaatacttcagacatttggaatgattgggcaagaacatcctaagcattctcactgataaggatttaaattcgtgtcatgttccttgctcatgattaggggttgttttgttgttttacccagtaataacgtgtttatttcattttctacctcattagggttgaactggaccctcatgtcagggactgtgttcagacctacatccgtgagtggctaatcgtgaaccggaagtaagttactttttttccactttttgtatataaatattaattttatattgctagtttttaaatatttcttaatactttgaacagttctaggtttacagaaaaattgcatggcaaatagagttctcatgtatgccttccttatccccactccatatcacacacacagttccccctattatgaacatctcactttagtgtggtacatttgttacagtagctgagccaatatggatatgttgttattaactaaagaccatagtttacattaatgtttactttttgtgttgtatattctatgggttttgacaaatgtgtaatgacatgtatatgcctttacagtatcatacagaattgtttcactgccctaaaaatcctctgtgttccacctgttcatcctccctccctggcaaccactttccttttttactgtctccataattccaccttgttcttcaatgtctttttgtggcttgatagctcattttttttattgctgaataatctttcattgcatggctgtaccattgtttatttatccattaacttactgagaaagaaagttctattttaaacataaagaatagactgcaagcttgcccaacccctagcccgtgggcaacatggagcccaggatggctttgaatgtggcccaacacaaattcataaactttcttaaaacattatgaggtttttttttttgcgatttttttaaagctcattagctattgttagtgttagtgtatttgatatttggcctgagataattcttcttccagtatggcccagggaagccaaaagtttgggcacctggaatagagcctttttgttgtcttctaattctgatgaattcccagggggaaaaattaagtgaattgaaacctggcctcagcttcagaggtggcattcgagtttatgaccaagaaataaattacttgctggccttccagtaagggatctttctctcctggattaatcaaaccttctgtgacattgttctgagctttttctctccatgccatggacctggacagcactctctcatgagaaacatctatgcacattgaaattctcagcctgcatgggtgtacctgttggggagtgagatgtggactctctacagattagggcacaccccactagagacacgtcacagaacctttgacaagacattagtagtttaaaattctgatagcctcactcctcctatacctcagtaagaattactattctatggggtaaatgatgaaagactttgaggattgggttttatctagctcctggaagggtgccattgagtttgtgctgaggttttctggagtaatgtcaatatgcacacattttcagcagcagaaaaagagaaagcattcattattaaaagttattaagagaaagttagatgccaatccatcatctgttctaaaatgaatggaaaacaaagtttgctgggcagtcagataaaattatggtttgctgataataaataaaagatttcagaacaagttgttctcaagtttttaaatgctatcattagaggtactttctggacattaaagatctaaaaaaaatctgagaaggaacaaatagaaagatccattttgatacatttggttttcagatttattttctatttcgggcttgtccactttttcatttctcatggcaatgcacgcttcttggagtagtgatttttcttgatcttgcacaaatgtaagagaaaaaaatgactctttttggaatactcgttgaaattttagaaataattatgaaacacaaatcactcagtttcactctagacagataatcatcatgaacatttgatgtctgtcctttgaatagtgttgggtttttttggtatatatttgcgtgaaaactaaataagattataatatcatttttgtaacatgcattttcagttttcacagtaaagagtgattctcttcctttgctattaaatatgcttcctcaatacaatgattgatgattgcataatatatttataccaaaatttatttaaccaattttaatatttaggtgattccttccttttcagtgttgtgcttaaaatgcaaaaacatccttctcaggaaaaatttgtacatatttatgatttttttctttggaattaattcctacaagaggaatttctatgtcaaaggatatgcacaaatttaaagatttggaatactagatcaaacattatgccgggcgcagtggctcacatttataatcttactcagcactttgggaggttgaggtaggaggatcccttgaacccaggagttcaagaccagcctaggcaatatacagagaccccacctctaaaaaaattttttaaaaaattaactggatatgatgacatgcacctgtagtcctagctactcgggaggctgaggcaggaggatcacttgagcccaggaggtcaaggctgtagtgagtgacgattgcaccactgcacaccagcccaggcaacagaggaagaccctatctcaaaaaaaaaaaaaaaaaaaaagccaggcacggtgctcatgcctgtaatcccagcactttgggaggccaagacgggtggatcacctgaggttgggagtttgagaccagcctgaccaacatggagaaacccagtctctactaaaaatacaaaattaaccgggcatggtggtgcatgtctgtaatcccagctacttgggaggctgaggcaggagaatcacttgatcctctaaaaatagctaaactgggaggcagaggttgtggtgagccaagatcgcgccattgcactccagcctgggcaacaagagtgaaactccgtctcaaaaaaaaaaaaaaaaaaaaaaaaaagattattgacactacatgcatgaatcctcaagaatattagatgttataatttatcaacatttccaattttatttgataaaaggttgtcttttttttcattttcttttactattagattaggcatctttcttctatatatttcttggccattttttatttttcctggtgctctgcttattcgtgaaatttgtgcatccctattaatgtatttgtctagtctgatttatttttataagcacttttttggtaaagatattaagccttgtctaccatgtattaaaaatgtcttccccagtatgccttttgtcttttaaagttgtttttaattttcaacattcagaattatttatgtcattaaatctatattaatatttttccttatgtttaattttggcatcatgcttaaaatttgattcacaaacttattattattttctaagagtatgggattaaagcattaatccagatcattagccacttgactgttgcttctgttcccttatgtgtctccatttgtttttatcttttctacagaagcaatggttacccatatatttattatatgcaagtttttgcatcttgttcccctaaaaaagaaaggaatatgtgttttaattttatgtttggcaacattctagggatgggattaccattggcccagttctctgcacccctgtgtaatggagcagttcccttcttaacggtcacctagtggacagggagaagtgtacaacttcagaactcattgtcagtttctggcaagctttcttgtagaaaagttgcatctctttctatccctctgcctcattctcttgcactctgaatctaacactctgcccatgaaaactaaaattcctagcacacactcctcccagggatcattctgtctctatatgcacctgtcgtattttatctgtggggagaatccagtacactattgccagatgtccttcatctcccaacctcacacagtacatttttagcttattgttttctgtgagttgtatctgtattgttttagaatgatggtagaaggagaaggacaaggagaaggtggtgattcatataaatgaaaccagctggaagctgtgatgctttcatagataagccactattatgaagaaggagacttcagatttctgtatagacactgaccagggactcgtgggcaggaaggtgtgcaacaccttcttatctttattcagtgagttcccctttggggagacaaagtttggtacatccttctctttccagctccatctgatccacagaggttctgtccagattcaggcattaagttatctcttcatttggatgagtttccagtttttctgtgtcttcataagtggtttactagaaagtcggaggaggatgcaataggggttgctggccatttgttaattagtgattaattatttagctctcctttaattggttatgtgccaaatcatgtatgattgttttgaaagaaatcaagtaatatggaggtgcattaaggaaaaggcaaatctcatgcctcactacttaccagtgtcctacccttcccttaactcactcttcactgcgtaaagcccagctgtgtagcttccagatcttttcataccctcacaaaaaatatttgtctatttatatttttcacataaagatatatgtattaatgtatgtacttatatattacaaacatttctttaaaataactgtccatgtcagagctatatcccattctactgaaatgctgcctagtattcaaagggtgaaggaatgtgtcctaagttactgaaactaaatgaccattttggttgtcaccatttttcataattgcaaataatactgaaacaaacatatctgcacatttgccccatacatgtgtgtgaatatttctgagggtagaaatgaagccagtgtacatggtatgctctgataggtactgccaaattcttctccagaaaagtcgtgctgtttcattccattaccaactgggcattaaactggcgtgttcccatattcttgccagtgctggatattatttattaaaataaaatttcagttcctccagtcttcttttagttattattttaatctggaagctattacacctactttctgaatacagtttcctatcaccaagtttcctttccttatgtgttctaaaatcccagttaaatatgcacttaaccatacaaccgtaagtcccactcttgagtatttacataaaacctatgtgcaaatacagcagtttagcagttttatttgtaattgccaagactgcatagcagttttatttgtaattgccaaaaactggaagaaaacccagattgtactcagttgggtagtagataaacaaactctggtaaatccatacaatggaatactactcagcagtgaaatggaacaaacaattgatatatacaacaacatggatgaatctcagatacagtatgctaagtgaaagaagccagacaaaggccgggcatggtggctcatgcctgtaatcccagcactttgggaggctgaggcaggtggatcacttgaggtcaggagttccagaccagcctgaccaacatggtgaaaccccgtctctactaaaactacaaaaattagctgggcgtggtggcacgtgcctgtagtcccagttactcaggaggctgaggcaggagaatcgcttgaacctgggaggcggaggttgcagtgagctgagatcatgccattgtactccagcctgggcaacaaagtgagattctgtcttaaaaaaaaaaaaagaagaagaacccagacaaaaaagataactgcatgattccatgtatctgacattctggaaaagatgaagctacagggatggaaaacaggtccatggttcccagggtctgggagtggggaagagggctgactacaaaaggacacgggagtgccctttgcgtggtgctgggactgtagtgcccatgatgtaaaatctgccttggaccattacattagaagaaatcaattccagttatcccaatattccctccaagtgaaatactttggtagcatatataataataattcaataagtattagctattatatttattaagtagtacctatcagaaaacatacttatattagcatgtcaaaggaatgaacacaaaattctctcccatatattgaacgcaccatggaggggggacctgccttcctctggaggaccatacttagtgaagccactttgccttataaggacatgcctttgttatccagaaccaagcagtcaaacactgatttagttagctcctttatttctcagttatctcctgctgatattacatttctccataatatctagagataggcttttatgtccttgctagctgtggtaatggttttgaatcccacttagggggcagaggagtagagtaatggccacttgtgttccctcccaccctcatcattctacagggcatttgccactcaagtactgtaattgagacatttaaatcatacaaataatgctgcccatgaaggatagaggaaatttttagatttccttttaaacctaacagagaaagattaagttacataaaaatgtaaaatacatgatctccagtacattgaaggaaatgtattttcttacttgaaatgtttgtgttacttagactggaagatttattaaatgatttccattctatcactcatgtttacagcaccaaatttggtgtccttgttctaaaaacaatagtacttttctccccatgacttttgaaaatgattactggtttactgattagcatggcgccatgtttgcttgtttgtccaaccttttatctgcatattttgataatgttgtgtggattaatatttgatgacatcctttgggtgatattaacgattttaagctttatttcttctgtcattttctctaaatgaaccaaagagggataaacttcagaatgtttttgatgcctggtggagagctgaactcttaagaaattaaacttgtttacatactatatttattcttgccgcagagacagtgaaacatttcatgagtgttatgggcagcatcataaaagcctttagactttgtttttcatctggggtgattaaggtaattctgaaggaaggttgagctcaaggagagctgagatatcaaggaatggggtatcatctgttttattactccatattttactcccagtgaagtggtaaacaattaaaattcaaacacatcagtgcatataattcagttactcccagaacaccataaaaatgtttccctgatcaataattgcttattatgacatgcatttgttgtgctagctgtcaaggtgcttagctatttgctttctaaaagtatgaaaagcacgcccggctcatcagcctatgtggtaacaaagagcaatccagctgtggatgtcacagagccactcttgacctgttgtgcatagactccctccccacaaatccaaacccactaagactctccaggctctgttaacacacaccagcctggttcagcttggatgccctcctcacaccatgtgggttctgattttccatgccaggcagtccatcttaaatggatgcatcctcaccgtgtttgggcttcaacttcctattctggacctcctcggctactccctaccccaaggcatggagggctgccttgttctgatgcaccttatgattttagcaccaaattgtacaggaagggagagaagggaaaggagaaagaagatgtgaaaggaaagagagggtagggaagaggaaaaagaagatgaggaacacgtattattttctaatcctcacaataggtcctcaaaatgagcaacatttccccctatttcatacttgaggaagctgtgactcagagagactaaggcacttgcccaaggtctcttagtacattaaggagccagcgtctgcacccagttccttctgactctagagcctggattctgctggctgcaccacactgtctttaaagagaacactctcaaaacgcgcttggtctttggattgtctcaaatgtgttagaatagtgttttaagaaaaggaatgcagatctcctgggaagcaataggtcgagttcatttcatgagaatcatttttctagccattggcctacttccccatttttctcctgtctgcatctaggtgcaacaggaacttggctttatttgactccattgccagggtggggtaatgaagctgggactctcttgtagccagcggcagtgagccagcagtctcactgcctacccagtgatggttccttctgtggccagcacttctggaatgagtcatctttacatgtttgccaacccttgtcctctcctccccagccaggttcacccttgctgctgtcaaggagctttgagactttctgagatttttaaatggggaagtagatgttaaacctagtatgaggaagagagggaaagtttgctctggtttcaaacacacagtcatagaagatgctagtcttaatgctttccatagcaaaaaccctgaaggcttagagtgtacacattgtgaactgaacttttaacattattgtgtaactcatttgttaatgcctatttgtcattgactgtggggtccatgtgaaaaactcccacaaacactctaacaaaatggaagacagaaaagaaagcaagcatcatttgtgtacaatagccaaagaacaatagccaaataaatttgatggtctcaaaagttaagcatcttttgaagagaaaatttgattttagggccaggtggggtagctcatgcctgtaatcgcagcactttgggaggcagaggcgggtggatcacctgaggtcaggagttcgagaccagcctggccaacacggcaaaaccccgtctctactaaaaatacaaaaattagctgggtacggtggcgcatgcctgtgatcccagctacttaagaggctgagacaggagaattgcttcaactcgggaggcggaggttgcagtgagccaagatcatgccgctgtactccagcctgggtgaaggagccagactctgtctccaaaaacaaaaacaaacagaaaaaagaattgattttgattttttcagatacagtgcatgaactttttatcataaaatattaaagctggggaaaatatcttagaattcacctcatgttcatgctttaccctgtgaagaaacagaggcacagagagaaataacttgaggataatggaaacaagcacacatctgtaagtgtgtgtgtgtgtgtgtgtgtgtgtgtgtgtgtgtcagagagagagagagagatgttcctttgtaagtaaacactcttggaaatagccgcattttattataacacaaaaagtaatgctaaagctgatatagttctggttgctaagcttcacacacaaaaggtctttaggtagctgcttcctaatttttatttctgtggcccaaaagtctccttgtaaaccttcgtgtcatgtcatactaaacctttgacatcaataccctttaaaatgtacaagtccttaaaaaaaaaaaaaaggcaaagggcaaatactaatgtgggaaatttgaattttaattaactgtttgtttcaatgttaggataaattaatgttagataaattctttggtaatttttccccctaaaattggatttttcaagaaacatcactggttcagtatattgttatttggggtagcataattttaggcgataacttaatatttgcatatatttgtcactactttgagttggtttttgtcccctgacccccagccaggatgttagatcacacagatttttttttctttgagcccttagggagagtccaaaacagtcacttcatgtactaggaaagtttacccagtcagcacacacagatatgttgttgcctacatttatatttgtgagagtgactgttaagaaactagcaggtttataaaatccgtgtgagaatttctctcaaataactgttaatggacaatccagcaatcctcccatctcaggctcccaagtagctgagactacaggcaggtggcaccatactcggctaattttttgtgttttttgtagagatgcggtttcaccatgtcacccaggctggtctcaaactcctgggctcaagtggtgctcccgccttggcctcccagagtgctgggattacaggtgtgagccactgcacccagcctgtacattttccttgaaatcgtttttggatgtttagtcttatttccttattcagagttcacctgtttattttttttttcatttccccaatttagcctgcgtttcacccagccctagcaatataggtttgggtcagagaaattcaagcggccaggggatgctgaagatggcccattatggccgggcgcggtggcacacatctgtaatcccagcactttgggaggccgaggcaggcagatcacaaggtcaggagatcgagaccatcctggctaacacagtgaaaccccgtctctactaaaaatacaaaaaaattagctggctgtggtggtgggcgcctgtagtccaagctactcaggagactgaggcaggagaatggtgtgaacccgggaggcagagcttgcagtgagcagagatcgtgccactgcactccagcctgggcgacagtgagactccgtctcaaaaaaaaaaaaaaaagatggcccattgtggtaagccttgacttgaattagtcaccaagctagtcttatctcttttctaggctaattcttgttttttgtttggctcaaaacaaattgtttgtcttcagaacacaataaaatccagggagagtgtcctgttcttcctacagacgtcactgggacatcttattctttaattaattcagtcaactaaaattggtcaaatacctgctctctgtgccagagttataaactttgtatttgtataattgctagtagctctcttacatttcttactttatctatctggcatttgatctacctaataccttccaatatcacctcatgtccctttaccagcttggtggtttttctatagttcaggaaatcaaacaaaatggtgtgtgacctggaggtactagaaaaacaatagcaaaccaactccaaagccagcagaagaaaacaaataaccaaaatcagagctgaaaaaaattaaaacgtgaaaatccatacaaaagatcaatgaaaccaaaagtttgtgattcaaaaaaaaaacaaggttgatagatcactaactagattaataaagaaaacaagagagaagatcgatccaaataagcacaatcagaaatgacaaaaatgacactacaactgatgcctcagaaatataaaaaatcctcagagactgttataaatacccctatgcacacaaactagaaaacgtagaagaaatggatagattcctggaaacacacaagccccctaaaattgaagcaggaagaaattgaaatcttgaacagaccaatagtgagttctgaaattgaatcagtaatacaaaacccaccccaaaaagcccttaatcagatggattcacagccaaattataccagatatacaaagaagagctagtaccaatcctactgaaattatttcaaaaattcaaggaggaaggactcctctctaactcattctgcaaagccagcatcattctgataccaaaacctgggagagacacagcagaaaagaaaacttcaggccaatatccctgatgaacatcgacacaaaaatcctcaacaaaatactacaaaccaaatccagcagcacattgaaaagttaattcatcacaatcaagtaggctttattcctgggatgcgaggttggttcaccatacacaaatcaataaatgagactcatcacatagacagaattaaaaacaaaaaccacaggataatctcaatagacacagaaaaggcttttaacaaaattcaacatcccttcatgttaaaaaccctcaacaaattaggcattgaaagaacatacctcaaaataataagagccatctattattcaactatccacagccaacatcatactgagtgggcaaaagctggaagcgttcctcttgagaactggaacaaaacaaggatgcctactctcaccacttatatcaacatggtactggaagtgctagccagagaaatcaggcaagaaaaagaaataaaagacatcccaacaggaagagaggaagtcaaactagctctgtcacagtgcaggcaatataattctgtacccagaaaacactgcagaccctgctaaaaggctcctagaactgataaacaacttcagtaaagtttcaggatacaaaatcaatgtacaaaagtcaataacatttccacacaccaataatgtctaagttgagggccaaatcaagaatgcaattccatttattttatccttttgaataaaatacctaggaatacagctaatcaaggaggtgaaagatctctacaatgagaattatgaaacacactgaaagagatcagaggtgatacaaacaaatggacaaatattccatgctcgtggataggaagaatcaatattattaaaacagccatagtgcccaaagagatttttagattcactgctattcctatcttaattagcaacatcattttttcacagaatttaaaaaaaaaaacctattccaaaattcatgtggaaccaaaaaacctgaatagccaaagcaatcttaagcaaaaagaacaaagccggtggcatcacactgtgtgacttcatactacactacaaggctacagtgaccaatacagcacagtccaggtacaaaaacagacacgtagaccaatagaacaagataaagaaccagaaataaagctgcacgcctacagccatctgatctttgacgaagttgacaataacaagccatgaggaaaggtctccctattcaataaatggtgctggagcaactggctagtcatatacagaatattgaaattggacccctccttttaatcatatacaaacattaactcaagatggattaaggacttaaatgtaagacctaagattacaaaaaccctagagaaaaaaactgggaaatactattctggccattggccttggtaaagaatttatgaataagtccccaaaagcaatggtaacaaaaacaaaaattgacaagtgggacttaattaaactaaagagcttctgcacagcagaagaaactatcaacagagtaaactgataaccaactgaataggagaaaatatttgcaaaccgtaaatctgaagaatgtctgatatccagaatctataaggaacttagataattcaacatgcaaaaaaccaccccatttaaaaatgggcaaaggacatgaacagatacttctcaaaagaagacatacatgtggccaaaaaatatatgaaaaaatgcttaacatcactaatcattagataaatacaaatcaaaaccacagtgtgataccaactcacaacagtcagaatgcctgttattgaaaagtcataaaatagactgggcatgtggcttatgcttgtaatcccagcattttgggaggctgaggcaggaggattatttgaagccaggaggttgagaccagcctgtgcaatgtagcaagactgtgtctctacaaaacatcaaaataaatggaaaaaaaaaaagaaaaagaaaaagaaaattaactgggtatggtggcgtgtacctatactctcacctactgggaggctgaggtgggaagattgcttgagcctaggaattcaaggctgcagtgagctataatcacaccactgcactccatcctgggtagcagaacgagaccctgtctcaagaaaaaaaaaaaggcaaaaattaacatgttggaaattagttcagtcactatggaatgcagtgtgaagatttctgaaagaacttaaaacagaactaccattcaacccagcaatcccactactgggtctatacccaaaggaaaataaattgttctacaaaaacgacacatgcactcgtatgttcctcacagcacaattcacaatagcaaagacatggaatcaacctagatgcccatcgacagtggactagataaagaaaatttggtacatatacaccatgaaataccacacagccataacaaagaacaaaatcatgggggtttttttgcagcaacatggatgcagctggaggccattatcctaaacaaattaacacaggaacagaaaaccaaataccacatgttcttatttataagcaggagctaaacatcgggtaaacatgggcataaagataacacggtagacaccagggattactaaagaagggaggatggaagcaggtgtgggttgaaaaactgcctattgagtaccatggtcactatgtgggtgacgtcagtatcatgcatacatcaaacctaagtgacatgcaatttacccatgtaatgaatttgcacatgtatcccttgaacctaaaataaaagttggaaaaaaataaaagataagatatcccgtatcctcaataaaaataaaagtggcgtgtttgtgcacttgactttgtaacatgttttccaaagatgtctttgagtcataaaaatgggaaatacacatgttggtttctctagtcatcacttgacaacttacatgttttacctttcttatgatggtctgtctcatttcttcagtgacagggctagacattctgttttaaactcttcccacagctgtatattattcaacacaactttaacagagttcatagagtggagattgaggatgtttgcaaagttaaatcatttatttttattttttcttaaccatgtcccgcctgctttattcattattaagaacattgatgtgaagattaaatggttttctctatttttatcttcaaacgatctctatttgtggcttctgcacattgctagatttattccagccacttacactagggtcatagtttagcttcagctcggagccaaatgccccacagctgaaatgaccgcacctctgaagtggcattttcccaggccatgcctccctttaataatgagccagccagggggtaaatttgtatctcattacaacagagccttgtattaggcctggagaataattaaatgtgaggaattataattggttccctctttgaaagctctctcagcaccatgtctacacttaagccattacttttatttttaatctaatggtttgccgctctctctccctctttctctctccaaattaaatatcaaccataaaagaaaccaaggaagtccagaaatctgtggctttaaaaagactggatctcgaaaagattttcacaagacgcttccgaaacagacgtttgagtcggaaaccttggagtgcagtgaacccgctgctcaggtatttcctgtcaacaaacatggttaccaggttactgggctcttctgcccagggcatgctgtcagttttacaaactagaataaacgatagacgcatagaaagtttgagtaggaggaactttaccatctgagtcagtgattttttttttcaaacttatttgtagctgtagaaattggtgttcaaatgaaaacccagaaacccaatgattaaaatagaaaaaagtggaaaagctctaactgggggacagagacaccttgggcccatccctacgacagttcctgcagagactcttggtgcccctaaggcaaactacagagtaatgaaaagctctatgctgaggccagaatacctgcattctcctagtgattctaccatgtactaactctctaacttcaagcaggataattaaacttattgggcttcagtttcctcccctgggaaacaaggatggtaatactaactcatgaggttatttgagtattaaatgagttaatatccataaagaattagaataatgccaagtacacttagtgcctagtcaatgctggtcactgttattgttattgtcattattctttttcttttttttttttgttgagacagagtctcgctctgtcgcccaggctggactgcagtggcacgatcttggctcactgcaagctccgcctcccgggttcacgccattctgctgcctcagcctcccaggtagctgggactacaggctcccgccaccacgcccagctaatttctttttgtatttttagtagagacggggtttcaccgtgttagtcaggatggtcctgatctcctgaccttgtgatccgcccgcctcggcctcccaaagtgctgggattacaggcatgagccaccacgcctggccagttgtcattattcttataaagtaattacagtttaaaattcaagttaaagtgtacatattgtgaaatgagcttttaacactattctgtaactaattttttaaatgcctggggtcatttgaagaactccagcaaacactctaacaaatagaagacagaaagaaagcaagccttcatttgcataaaacggccaaagaacaatagccaaataaattccatgtttccaaaagttaagctctatacacctatgctcacagcagcattattcacagcagccaaaaagtagaagcagcccaagtatccatccataatgaatggataaacaaaatgtggtcgccaggggctgggggagggaggagtaggaagttattgtttaatgggtagagtttcggcatcccaagatgaacagcattatggagatggatgctggtgatggttatactgcagtgtgaatgtgtttaacactactgagctgtccaacctgcccattttatagatgagaaaaataaaattgagaagaaaaaatttgttcaagtttgcacagaacttcttgtaaactaatatagttttcagcttccatgtgtcttcataatacaggaatctcaccatgctggaaatgattcgaggtttttaaataatactaatttttcagacaaggtggtccccctaaagcaaagcccactacttacttggagcttcacagtagaatcagccatcatttccagcgctaaatatgacaggcttactgagggatagaatacctggatgctctgctctatgggagatttaaggaatttttcatcagtaattttgactgaattccattttcaccctacatgctgaccaattaaattgttcctcttaatgttagtcagatagaagccacggtaggtatttcagcagaagaaatttaacacagggaattgattaaaccggttttggaggtctgagagaaccaaaagggaaaaatggaggctatcctaaaatcgtcattatgggaaacagcacaccagcctggggctggggtatacggcagtggttctccacttcagcttcatcagaatctcccagagggtttgttcaaatataggttgctgggccctgtctgctggaatttctgattcagtaggtctggagggtgaacctcatactttttaattagcatttcctaagtgatgctgatgctgctggtcccaggaccacaatttgaggactgcaggtctaggggaagatcttggagttgtcagaacgtagaagctcagaagaggagcctgagagcaaggactgaaatccctgagaaggtactgcccagctggtggtgttgtctcaagatctcagagggaaaaacctcatgaagcctggactcacgcctcacaggaggagaaattgcccggctggtgctggtaccttcaaggaggtaagataagggtgattctggaagtaccaaaagaacctgaaggctagaaccagctgtcactacgaaggtgagaggaatagcaagaggaaggagccaggccctttgacctccttgaaccatccggtaaccctgtagtgctccctattgacagaacctaaagggagcagcagacacagcggaaatatgatttgctgacctagcatcaaagaacaaggcataaaagggtgaatttggagcccagaaacaataggtgaagaccagcgtacacacaaagcacacgctttcctgcagcatactagcagagaactcaagtcactgtgttgtgtgtggttttttttgttttttttttttttttttttttttttttttttttttttgagatggagttttgctcttattgccaggctggagtgcaatggcatgatctcggctcactacaacctccgcctcccaagttcaagcgattcttctgcctcagcctcccgagtagctgggattacagacatgcgccaccacgcctggccaattgtgtatttttagtagagacagggtttctccatgttggtcaggctgatctcgaactcctgacctcaggtgatccacccaccttggcctcccaaagtgctgggattacaggtgtgagccaccgcacccggcccactgtctgtgtttaagagccaacttgatcatatgatccagcagtctcactactagatatatgtccagaggaaaggatatcagtatatcaaagagacatctgcactcccatgtttattgcagcactattcacagtaaccaagacgtggactcaacctaagtatccatcagcagaagaatggataaagaaaatgtggtatgtatacacgatagaatactattcagccataaaaaaatgaagtcctgtcatttgcatcaacatggatgagtctagaggataagtgaaataagccaagcacagtaagactaatactgcatgatctcacttatatgtggaagataaataagttgatctcatagaagtagagggtagaagtggtaactagatgctgggaaggatggatggagaagggaatagagaggttggttaacggttacaaaattatagctagataggaggaataagttctagtatttgatagtactgtaaggtgactagaattaataataatttattctgtgtttccaaatagctagaagaaaggattttgaatgttcccaacacaaagaaatgataattgaggcaatgggtacactaattaccctgatttgatcattacacattgtacacaggtattgagatattacactgtattccataaataggtacaactattatgtgtctattaaatttttttaaagagccaaattgtacaaaagttgtttgttttgaaatattggaataatactcatcatggagagaatctcagactgcgagatgacagcaatgttttcaattccactctcattcttgtgcaccttcttattgagtagaatggtgaggccacatagctagatttataaaatttaaacaagtatatgataagattccttggtacacgtagattttataaaaattagattatattatgcataatattgcaaaacttcctttttcatattagcaatatactgtgattatctttctcttccaattaatacgtgttctttcttttttagagacagagtcttgctctgtcgcctaggctggagtgcagtggcacgatcttggctcactgcaacccctgcctcccaggttcaagtgattctcctcccttagcctcccgagtagctgggactacaggcatgtgccacgacacccggctaattttttgtatttttagtagagacggggtttcaccatgttagccaggatggtcttgatctcctgacctcatgatcccccggccttggcctcccaaagtgctgagattacaggcatgagccaccgcacctggccaggttctttcttttaatggctacataacattctattttatgaaagttccaaaatctcttaacacttcctttttgggggcatttagtttacttctattgttttgctatcacgaacagtgtttcagagatgcccttgccctcacattcttgcacacttgccagttataccctacggataaattcttagaagtgaaatttctagattaagggatgagtaatgttagatttttttacttatatgtatcttgatatccttttaaataaatttgggaaattaaagtcattttccttaaactcttataaattttaagaaaaacaaaagtattaataatcgaagtgttaatattgattatttctagcacattcagtttggggaaaatttatgatctagtagagtagtacttttgtgaggtagatgtcacaaaaaatgtgtagtatggagaaattgtccagtagtatgtccatttagtagaattttgagaataacattttgccataaattttatagatatttaccattaatccatttgtagtcctacaacatatagttgattacagttatacattttttgctgagtctttggttcaaagcatgcagttcccaattacaaagacattcctaatggaataaaacatccactttgtgactgatttaaggttgttttcttaaagcacaccgcagccaaaagtggacacagcttgaatagcaaattttttcctttttgttgttgttgcttcatccaataactgttaccaaattcccgtagaaaagtgttgcccactcccacatcgacctttggaagcataacattcagctttggtgtctatacacaatttaatttggaaggctcctcacaaatcatcttattttccagtttcaaaaaccaagttctgagtggagattaagacagggtctctttatttcccagtgcagtctcctatctatttatttgtgaatgaatgaattagttaattaatgagccagggtttcactttgtcacccaggctggattgcagaagaagtcatcgtggccaagcgtggtggctcatgcctgtaatcccagcactttgggaggccaagacaggtggatcacttgaggtcaggagttcaagaccagcctggccaacatggtgaaaccctgtctctactaaaaatacaaaattagccaggcgtggtggcgcgtgcctgtaatcccagctactcaggaggctgaggcaaaagaatcacttgaacctgggaggcagaggcagcagtgagctgagattgcgccattgcactccagcctggccaaaaaatgtgaaactccgtctaaaaaaaaaaaaaatccaatctttcctattggctttattaaatacactttaactttagaagcttagaagcacaataattagaactggcctaactttaaaaaaaattttcacaaagaaattagtaacttgtagggtcatttgtaatctttttctctgttgatttttacagttttaaaaagttaatacaataatttatttacttattttttgagacggagtctcgctcttgttgcccaggctggagtacagtggcaccatctcgggtcattacaacctccacctcccgggttcaagcgattctcctgcctcagcctcccaagtagctgagattataggcactggccaccatgcccagctaattgttttgtatttttagtagcgatggggtttcaccatattggccagtctgatcttgaactcctgacctcaggtgatccgcccacctcggcctcccaaagtgctgggattacaggcatgagcccaatattttaaaaatagtacattattacagaagctagatgtgcactttaaattattatcagaaaattagtatgacagacaaattctatgattgtcccatcatctgggcctgtgacattcacacctttgtgatgttcatccccgactgtgggtgggacctgggacttgcttctgtcaaaacaatatggcaaagcatgagaggatgtcacttgtgatcatattagatagcagccaaaatggattaaagacttaaatggggccgggcgcagtggctcacccctgtaatcctagcactttgggaggttgatggcggcggatcacctaaggtcaggagtttcagaccagcctggacaatatggtgaaaccctatctctactaaaaatacaaaaataaccagatgtagtggcggacgcctgtagtcccatctgctagggaggccgacgcaggagaattgcttgaacctgggaggcggaggttgcagtgagctgagatggcgccattgcactcaagcctaggtgtcgcagcaagactcggtctttaaaaaaaaaaaaaaggtaatcatacctcactgcagccttgaactcctgggcggggttcaagcagtcttcctacctaaacctcccaagtagctaagactgtaggtgcacgccaccatgcctggctaagttttgcttttttttttttttttaagagactgagtctcattgtgttgcccaggctagtcttgaactcccggcctcaagcagtcctcccaccttgtctacccaaggactgggattaaaggcataaaccactgcacctggcccagtctcctttttgttacaacttcctccagctctgttttgctctggtgtgagacatgagcatggttcattaagaggcttggcccccccagccccaggaaagaacaagccaacaaccgataggaatgtagtactgtttttagtcctttcctcaggactggtttgtctgcataagatgagtaactacctgcttccaggtgagaagaagacatttaattttagagtagtccagccaggaagctgagatgtcattcttatcaaatccgcagtttcttcagaagacttgaggcctggctgagattctgtagtcccaaattggagcagtcttgagacatccaagattcttcggttctcattttagacttgccgtctctctcacaaagacccactgttttctctcacaggcaggcccccgccacttaaacgtgctgtgcgacgtgtctgggaaaggccccgtcactgcctgtgactttgacctccgcagcctgcagcctgacaagcggctagaaaacctcctgcagcaagtgagtgccgaggactttgagaagcagaacgaggaggcccggaggaccaataggcaggccgagctctttgccctttacccatcagtggacgaggtgggtgccactgtttccatactggagaatctcagtgaagactctgagagtcatgtggacaattgtgttgttcattattactatatagcagcccatggtgtcagggctcacttgtatgatttctggggcctcgtttttcactcaggcaagcctgtgtgtcatagcagagccattattgattatcacacagatgggattctgataataataacaactggaattttcatagcactttacaaaatatgttcactaagagcatctcatttaatccccaaatgtttcaagggtctacatgtagtaatcacacccagcaagtcaaaccatcctattatttgaggggatgtgtggtcactaatccattgagacatacattacttaaactttgatgttctttagtgctttgttactttctttttaatggtctctatgagcaaccagagagacctgctttgaaaacatttcaggctaggataatcacagcccatgctcccaatgtatagaactttgggatcttgattgtttacttcttcatttattggagctgactgacaacaataggataatgtagactttgcctgtggtcactgcctgaggcactttggatgaaatgagaggtgacgattattcaagccttttgtctgtttgaactccttatactgtataggaggctctcagttttcccctctgcgtgaggttatctacacttctgggtcttgccagaacagattactgctatatctctgctgtccaaatggtattgaaagttcagttggaagaaacaggatttgaggaaactgcataaaagatattctatccatccatgcctctaaatatttgaaattcgatccttggattaagtgagacaatcagagagcctgatacccccacccttctggattgtgtttgctaacctgcccttcagtgagctcacgactggtcagcaaggaggacaataaaggaaacagcagtcatgagataggatatcacgtccacatggaaatactattgttgacattgacctactcaccatctagcaccttcctctttgatgatctaaagggcaattagccttcacatcttccgagaaagaagaagcacgcttctgctgagataatacaaacacttagagattgtgctcattttgtaactaactctcttaagttctttacttagagcaaacttctgtccaccttcaccaaatgtggcaacttaatgattggggtcctgaatttactccagctttcttttcttttcttatcctgattttctaagcaccttggtttcctcatctatttttattttatttgcagtttttgtcagcagcctcaaatggtcttctgaatgaggcagaatataaaaataaattatctcacttatatatagaatctaaaaaagtggatctcatagaaacagagtagaaaggtggttatagcaggggctgtggggagagggagaaggtgttggtcaaaggccacaaagtctcaggcgggaggaatacgttttagtgacctatcgcactgcacagtgaccagagttaataataatgtgttacatatttcaaaactgctttaaaaaaggatttttaatgttctcatcacacacacacaaaaggtaagttggtgaggtgatagatatgttaattagcttgatttaatctttctacaatgtatgcatagatcaaaacattacttgatttaatctttatacgatgtatacatagatcaaaacatgacactgtaccccatagatgttcacaattactacttgtcaattaaaaaataaattaataaagtatgaataatgtgagcaatatcatcatctcctttcctcagattaaaaagcaacaattaggctaaagagctttttcaagattcaacagataaattaaattacaaaatggggccctaacccgctaactacaaagttcgtgttcccttgtttatgtatctacatacatatgactacctggtatgttgggacacataactgaaatccaaatatgatatttttaaatatcatgtaactttttagtttccatccacgacattaagactttttaccagatttgtcaaaacatattaaatcagactgatttggcctttactttccttcctcttcctctcagttctgtgatggagatgccaacatgtaatagagggacccaaagtggatgccagaagagagagaacaattaaaggatgcagagaatatgtccagtgagacgtttgcttgtcagtgtctccctggtggtattagaggggagaatgttccatctgaacagattaaaataatgaaacgtagcctggttttagaggaactttgttttatgatctttgaaacaatgcagacgctccattgggactgaatgttataatctgggagcaggcctaatggggcctgcttttattgagtagagagaagtgcttcgtaattagtgttgcagttatttgtaaactggcgtgtctaaaatgcttgagggcctctataccagccctttaatattttgaagctgttgtcacagaaattgcatttgtatttataatttgtgctttctccaaagaaagttctatggaagaaaggtaaatttctgcctactctgacatgattacaaatgctggttttttcgatgacacaatcagatttttaaatatatcattacttgatttccctgtaaggaaagttagaagagaggtaaactagtatatccaagttatggctgagtctacaggagaagcaaaagttggacttaaccaccaagcttctataaggcaagttctttccctaattcattctgagtctacaaaaggcggttattctacaaaaggcattctatgtcaatccctaagaaagattccactgatactccaaattatagaaaagtttgctgaggctgttggttacaagtgacagaacccaactaaaaccaattcagaaaaaaaggctaggggagtacttcttggctcacctaagaaaatcacaggtaggcaaatgtggagttgacctctggatccattgggagagtaaatgaaagaatatcatctctctcatactgtctctttctctctcattatctctttcattccgttcatttatatatatttttaggatgatgaaaacaagaggtatccattaatgtttcacatttccactttctgtttgcttgggaattagttgccatttcagttagctataaagcctgaggaaattcatatagcttagaagagactgaggaaatatatcacccaaatgtcatatgtggaccttgtttggatcttgatttaacaaaataacagtaaaaacaaattgagacagtcagggaaatttgaaactgacaaaaattatttagtggcaataagaaattattaatttttaggcataatggtattgctgtatgtttttaaaagtctttatcttttaaagatatgtactgaaatatttatatatgtatatggtctctgggaagttgcttctatgtaatccagtattgagcgagaaaggtggtaagtgggtaaatagatgaaaccagaatgcccctgaattgaacttgttgaagctagatgatgggtgaatggttcttcattgcattgctctctcaacttttgtgtatgtttaaaattttcccaatgaaaatcttttttaaaaggatttcaaaaattagaatctagaccaaaggcagtcccagaaatccatgagtgtctctaccttcaggttgttttccagttagggagatcttccctttagatatgtctgttccaatgatcctaaaaggtccagattgccctgagcgagtaggcatcaaaacaatgtctcctctgaaataaactcagccattccacccagcaacatggccaaccgccgtaaccacaaggaatggggaccacagggagaggttggagtaatgatgagcttaccacattgatcattccatcaaagtgggtacatatttaccaggaaggtgactttactgctatttgcaagaatgttaagcttgctgtggggtattcactggaaagctcccaggaaaagacagtgagatgtgaccctgttctttggacccttgcgatgggcagagcactcaccagtgtttggaaagcatactgcaagagtgggaattactgttttcaaggatttgcactacttatttttgcatacatgaatataattaacatagaatgatagttcagatacagatgttaaggttacaataggggcttgatatttctctttaagtgtttagtttctgtgcggtaaaataaacaggtagagctcttaatttgtcattactaaatttcatatacctagcactttaggaagctctaactgcataagcctgtctagaacttgtcaattcaaccccaagtctctatcatctgtttaagaaaacagtgaactgagaaagtgactctgtattataggatcaatggtttacagccttaagtgaaccattctgactcagatttcaaatctgaaactcacatacttactagtaaagcccttgacaggagaaatattgcaaatgtgtaattagagtgggcaaaaaacacacaaaaacatcaacaataggtataagattttgcaatgccatctggtggatgttactaagccatatccatgttcacatttccttccttcctgcttcagtctctttgtcttgaatgcttgggtttctaaaaggagaaactgttttgctgcaaatgctggctttgaggttgggggttggaagagaaactttcttataaaaggcagagtgttagaaaaaaagcaaatctaagttaacttgagccgtggagggtagccttcccttccctgggttaactctaattggagctccccacagaattcactaatgatttccttacgatgtgattaaaaataggaggatgctgtggaaatacgtccagtaccagaatgtcccaaggaacacctgggcaacagaatattggtcaagttgctgaccttgaagtaagtatcaacaaacacactgccaccgctttgagatttatcttgccttttacatacaaatgttgtgtttattatcagagcttgaatcaaagcggagctcccaaaatacgtctaacagtgggcagctgtggagtagtagaaagggcacgtttgagtccattcctggattttttttctaccaacttcttgatggtcattcttctacaatagagaaggcaaacacacgtgtctactaaagttaggcaggtaaggtcattgagtgaaatgacctacattaagaaaaatagcgcttaagtcagtggtgtgctggagtcgactgtactaactcgtgagatctgacagtgcatatctcttcctgggttcggtgaagtcacattggtaactttaaattggccatggcgaaagtatttacaatgtagaaatcagccaatgctacacgtttgcaccaccctcagcacccggagattatttgtaaaacatttaccagtatgccactgttgaaacacaatgataaatgcaactgaaactcagtgccaggggacaatagggagtggtgaggactgtagtaaactatgttaagggggcactcactgctagcaacagactcttgccatccaaataaacaggcccatttttgtcaactgtcttttctattttttcaagagaagctgaaaacccagatttttctgcataatataccgactccctaaatatgttctcattccctttataaacaccatataattaaaacacgactacagtctggtttcatcttgtgggccaattatttgccacatctacttcaaagtagttgcatccaaacgtttcaattgtatactatgatagcaaaaaaaaaaaatcctctatagacatgtattaattttgtactttcatattaaaatattatctacattataaaacataatagaaattttaaagatgaactagataaatctatataaattctagtattttcttcttccactgcaatagattgtcttgtgtaccctcggagtgcctccatacctctcttcgtctctgcagactgctattttcaagaattagttctccttcaaatccacagatgaaaactttaaagttgtacatattttacctaagcaaaactacagaagcgtaacatttatttatatactattagatgggtcatccatctctcaaagtcacttcataggtcccttcagcggcccctggtttgcagtgagaaggcatctggattctggatgtaaggctgggtttcaacccctgggaacttccctgggattttgagttcttccctataaatgaagttgatagaccttatggtctcaaaattcctacctaccacaaacttctatgattctaacgcatagcctctgccaacttcttctgcctcagaaaacaagccagcaagtctgctcacacagctatgggtggtctcttgatattatagtctcctcccgctggccagttctaccagagggtcttcagggccttttgtacggagaaatgagcagcccataaaccagctgagtgtcaagtaatgggcacagaaaagcaagctcttgcccttgcaaaccaacctggcagtgggagcttcctcatctgtctggttggcgggaggactgagtggaagtggctcttcccctctgcattgtttaggaagccttcgctattgtctgagggacacacctgccccgacaggatgcatcatcaggctacttttagatgcagcgactatgtcatttgagatggcagaaattctcctctatggtgctcatagccaagctttctagacctctccagtgaatgagaggcagctgttctcacaggtgggaaaacatggtcactaagagagatatgtgttattttaaaaaaatgttaatggaggccaagtgtggtgactcacacctgtaatcccaacactttgggaggccaaagtgggaggatcgcttgaggccaggagtttgaggccggcctgggcaatatagtgagaccccctctctaccaaaaactaacagatgtgttaatttttagccctagctacattgggaggctgaggtggaaggatcgcttgaggccaggagttcaaggctgcagtgagctatgatcatgccactgtattccagcctgagtgacagagtgagaccctgtctctaaaattaaaaaaagaggagtcacttgaatatctcttaatgaaaattgtaaagtgcagtttctagtgatgtccccgcaactgccaaagcagaaattaagtcgaattgacatatttgccaggtgcacttggcctgctcatgtgttttaaatagtatctatactaacctataactgcaagagaagagatagaccaaaaagacagccctccgagtaactacttagagtaaactagatgaaagaaagaaacaaattcttataggtaagcctagaatgtgacagtatgaatagtaaaaatataagggtaatattaatggcaaatgttttcccatttacattgatatgtaggattctattcataatactacatgttttagcccctgaggaatttgtttaaagttgtagacatctgtaactgtctctgtattgcttttcagaaatatagaaaccctcaaagatacagagagaattagggtcctgccaattctgcaaatgtttgtaacagaaaaaaaaaaaaagaatgacaacaaagtatttttctgttttgtgttttaaatggagaaatattttaagatttaataccatcttatgaaaagtaatctcagctcttaggagtcttcttgatggtgaaactttaatgtgcagaaaatttgcccaggcagtttcttttaaatgcagattttggaggaccttccataacaatctccctcaagagattctggttgagtaggtctcaggtgggatcaagaaacctgcatgctggctaacttcttttgcttcaaaatgctagattctggggactacacttaaagaacaaacactcacggaaaaagcccaggttctgtgatcagagatggctgggctcaaaacctgaccgaacactcacggaaaaagcccaggttctgtgatcagagatggctgggctcaaaacctgaccgaacactcacggaaaaagcccaggttctgtgatcagagatggctgggctcaaaaccggaccgaacactcacggaaaaagcccaggttctgtgatcagagatggctgggctcaaaacctgaccgaacactcacggaaaaagcccaggttctgtgatcagagatggctgggctcaaaacctgaccgaacactcacggaaaaagcccaggttctgtgatcagagatggctgggctcaaaacctgaccgaacactcacggaaaaagcccaggttctgtgaccagagatggctgggctcaaaacctgaccgaacactcacggaaaaagcccaggttctgtgatcagagatggctgggctcaaaacctgaccgaacactcacggaaaaagcccaggttctgtgatcagagatggctgggctcaaaacctgaccgaacactcacggaaaaagcccaggttctgtgaccagagatggctgggctcaaaacctgaccgaacactcacggaaaaagcccaggttctgtgaccagagatggctgggctcaaaacctgaccgaacactcacggaaaaagcccaggttctgtgaccagagatggctgggctcaaaacctgaccgaacactcacggaaaaagcccaggttctgtgatcagagatggctgggctcaaaacctgaccgaacactcacggaaaaagcccaggttctgtgaccagagatggctgggctcaaaacctgaccgaacactcacggaaaaagcccaggttctgtgaccagagatggctgggctcaaaacctgaccgaacactcacggaaaaagcccaggttctgtgaccagagatggctgggctcaaaacctgaccgaacactcacggaaaaagcccaggttctgtgatcagagatggctgggctcaaaacctgaccgaacactcacggaaaaagcccaggttctgtgatcagagatggctgggctcaaaacctgaccgaacactcacggaaaaagcccaggttctgtgatcagagatggctgggctcaaaacctgaccgaacactcacggaaaaagcccaggttctgtgatcagagatggctgggctcaaaacctgaccgaacactcacggaaaaagcccaggttctgtgatcagagatggctgggctcaaaacctgaccgaacactcacggaaaaagcccaggttctgtgaccagagatggctgggctcaaaacctgaccgaacactcacggaaaaagcccaggttctgtgaccagagatggctgggctcaaaacctgaccgaacactcacggaaaaagcccaggttctgtgatcagagatggctgggctcaaaacctgaccgaacactcacggaaaaagcccaggttctgtgatcagagatggctgggctcaaaacctgaccgaacactcacggaaaaagcccaggttctgtgatcagagatggctgggctcaaaacctgaccgaacactcacggaaaaagcccaggttctgtgatcagagatggctgggctcaaaacctgaccgaacactcacggaaaaagcccaggttctgtgaccagagatggctgggctcaaaacctgaccgaacactcacggaaaaagcccaggttctgtgatcagagatggctgggctcaaaacctgaccgaacactcacggaaaaagcccaggttctgtgatcagagatggctgggctcaaaacctgaccgaacactcacggaaaaagcccaggttctgtgatcagagatggctgggctcaaaacctgaccgaacactcacggaaaaagcccaggttctgtgatcagagatggctgggctcaaaacctgaccgaacactcacggaaaaagcccaggttctgtgatcagagatggctgggctcaaaacctgaccgaacactcacggaaaaagcccaggttctgtgaccagagatggctgggctcaaaacctgaccgaacactcacggaaaaagcccaggttctgtgaccagagatggctgggctcaaaacctgaccgaacactcacggaaaaagcccaggttctgtgaccagagatggctgggctcaaaacctgaccgaacactcacggaaaaagcccaggttctgtgatcagagatggctgggctcaaaacctgaccgaacactcacggaaaaagcccaggttctgtgatcagagatggctgggctcaaaacctgaccgaacactcacggaaaaagcccaggttctgtgatcagagatggctgggctcaaaacctgaccgtgccagtccctaactgtgtagactttggcaagttccttattccctgggaaccttgctttcctggtgtgttaaatgcagataatatctgcattacgctgtagttgtgtaaagagactgatgtgtggaaagcacttattataacacaattttaagtctttaataaatgtcaattctctttttctttctcggaaccacagaggacttactactcagtaccaacctaagtatatcacagcaatattcaggccctttgtgtagtagggagtaaacaattaaatatagattgagcatgccaggcagcagctggtgagcctaggcccaggaaagcctccaattggcctggtgcagtggctcacacctgtaatcccagtactttgggaggctgaggcaggtgagtcacctgagctcaggagtttgagaccagcctggacaacatggtaagaccccatctctactaaatatacaaaaattagctgggtgtggtggcacatgcctgtagtcacagctgctagggaggctgaggccgaagaatcgcttgaacctgggtggcggaggttgcagtgagccgaggttgcaccattgcactccaccctgggtgacaagagcaaaactccatctcaaaaaaaaaaaaaaagaaagcccccaattaatgtgcaattacctaataatagaaagaataatcatagaaatcctcaacactgggcttttcggtggtaaaatgtatgtaacataaaatctaccatctttttttttttttttttttttttgagacagagtctcactctattgtccaggctggagtgcagtggcatgatctcggctcactgcaacttctgcctcccaggttcaagtgattctcctgcctcagcctcccgagtagctgggattacaggcacttgccaccacgctcggccagtttttgtggtttagtagagacagggtttcaccgtgttggccaggctggtcttgaactcctgacctcatgatccgcttgcctcggcctcccaaagtgctgggattacaggcatgagccactgcgcctggccaaaatctaccatcttaaccatttttaaggtacagttcagtggtgagtacattcacattgttctgcaaccatcaccaccatccatctccaggaatttttctcttcccaaactgaaactctgtacccgttaaacaataactccttattctccctactccccagcccctggcaactcccattctactttctgcctctatgaattttactactctaggtgcctcatgtaaggggaatcatgaagtaactgtctttttgtgactggcttcttttactcataatgtcctcaggttcatctatattgtagtatgtatcagaatctccctccttttatggctaaataatattccattgtatatatgtagcatattttgttatggcctcatatatgtatctgttcatggacaagtgggttacttccaccttttggctattgtgaatagtgctgctacttggcattgtttttaagatacattcacacacatcattatacgtgatcctcacaacaaccaggaaaatggaaaggcaagcatccttaccttattttgcagataaataaatggaattcagaaaggcgagtaacctgattagggtcgcagaattagcagatggtggaggaggaacagagtccaggtctctgcctgggtgccctgggagtctgccatgattccaaattgcctcatttccaaaggcgccatttgagcaaataaccctttttgtctgtgctcatattctgtccaaatattcttctaaaaagtcctcttttgagacaaagctatccattgatgaggacatcctctcacacatacctggagacaaaacatgactttattgacatgatgtctgaggtaatggtggactggggcccttttcctggtgctctctgcaggtaacatccaaagccatgggacatcaagctgagaaacttggaagaccttcaccagtgttccatgtgcacctgtaatgtccaccaagatactaaaggcaaataatgcaccaggattatgctttgggattcaccgtttcgaggggaattggcaattagggccaatatgagggctcatctttctagctctcatggggcccaggcacctcagtgtttatctgctgtgctcaagcccctccctgacctcaactcagcaactccccagtaatggagttaggaagggccagacattcatccccatcaaaacccagccttcttctgactgtcccactacaaatctaaggaaaagcaattgaacttttcttttgttgccatctgaaaagccccattccttagaattgaataatacagattctatcctttaaatttttttatttcaatggctttagggtaagtggtttttggttacatggatgaattgtatagtagtaaagtttgagattttagtgcacccgtcacccaagcagtgtacattgtacccagtatgtagtttttttatccctcatccccctctactctcctgcttctgagtctccaaggtccattataccactctgtttgcctttgtgtactcatagcttagctcccactaacatacagcatttggtttccattcctgagttacttcactcagaataacaacccccggctccatccaagttcctgcaaaagacattaattatttccttctattttatggataagcagtattccatagtgtatagataccacattttctttatctactcattggttggtgggcaattaggttggttgttggttccatatctttgcagttgtgaaacagatactatctagcaataaaatgtgaaatgtgaacaagtccattacctcagacagaaagtctaccctctgaaaacacagtagttacaataagaaggtgaatcacactaaaggtccattcagcccactctctcttgcagtgagtgagtgaatgagtgagatattccaaaaatatccaccatgcttttgtaatgtccaccatgatctcaaatgattaggaatttttcacaaacctcctatatttctctattaatatcccagtgcgattctcatatacttggagttttccaaatatttcgggaaactgctcatatttttaaccagtttatctatctaggtgttttcagaaaattcaaaattatctaactcaaagccacatagattttcctctctttctatggtaggttcgagattgaaattgagcccctgtttgccagcattgccctctacgatgttaaagaaaggaaaaaggtaagaaagcaaagaaaaatccatccctaaggcacatatattgttcatgattctttgcatgtatgtttttaaatttctttgcagcaagaacctatcagatttgaaagcaaatgatctttgatgagtccagttctgttgcctttgcaatttttcaagcagtggtctgagaatgtaatttatgatctttgaagaattttagagggagaggctactggaggtgctggcctggttggaatagagaaagaatgaaatagcgcatggggttatgtataaaacaaacccatttaaatacatttttaacaagcttggatgcgcatgtaaagcttcctcagtttgagagttctttgcactgtgaaataggctcatgactgaagggcatcttacatggtagaggtctcaatttgtcacagagttcagaccttaccaactgtaatgtgcttttaatgaaaacagtgaccaagacctctcgtgtgtttttaatgtttagtcattttgtgactcctagaagaggacagcaatagcaaatccagagtaggatggacacttctgcccttctttacccataatcattctgtatttaaggaaacaagcatctcctgcataaatattaataatcactgagatttgtaggataggttaactgctaaaacaagcagaacccaatctcagtggtttaaagcagtagttctcaaacttgagcatgcatcacaatctcctggaggacttgttaaaacacagattgctggacctcacccacagagtttctgattcagcaagtccaggtggggcctgagaatttgcatttctaacagtcccctgctgatgctgaagctactggtcaggggaccacattttgaaaaccgctggcctataagcaagaagttgctgtctttgtttctttaaccatccagggtgggaggagggacccctctgttccacgcagccactcagaaatacaggctggcagtggctcctccatcttcagtatgttctctccccaaattactcttgtcactgccattgctgcccctgaagaagagaaaagaaggatggaggaggcctggaagtttgatacattgcttctgctaacaattcactggagagaattgagtcacatgatcacccctcattgcaaaggaggctggtaaatgtagtctctgcctgggcagccactcaccactaaaattctcatggtgatgaaggagagaacccaaccatacagtggctcttaagtaatacgacactaagagagccaggagcactgttcacatcatgctcttgctcagaatcttcactaagattcattccctacaaccaggctttcttcatgatggcattcctctaccttctttccatccatagtctatgcagagtcaagctagaccgctgactaagcttcccccagccgttcaagcctctgagatatttattcatactctaatctctccctggcacatcatcaccttccacccctgcctatcagaatcttctaaggcccatccatctccagtgctgcttccatgaaaagttgtccttgtcacccaactgcaaatggcctgtcactctggaacttccacagtgcttctttgtatgcatgtggtgacttgtattttgcttttactgtagttagttacatgtttaccttttccctcacctttttttttttttttttttgagtcagggtctcactctgttgcccaggctggcatgcagtggggcgatcttggcttactgcaccctctgcctcccgggttcaagtgatccatcctcccacctcagcgtcccaagtcgctggaaccacaggcacatgccaccatgctggctagtttttgtattttttgtagaggcagggtttcaccatgttgcccaggctggtttcaaactcgtgagctcaagcaatgtgcccgccttggcctcccaaagtgctgggattacgagtgtgaaccaccacacccagtccttccctcattcttgattgtgaattaattgagagcagaggtcctcctcttctgtagtgaagtaactgatactcaggaaataccggtgggttaataaacatttaaatgtttcaaggaacatctctcaaatggctccagaatacctagacattgtgacaaaacatttgtcagatttatccaggagccactttcctaaaccacatctgtgattattacacttactccttcagcaaaatttctctgtggtgtttttactcctttttaacatgtttaaaccatgaatgcaacaggtctaacttatatttcactttgctgctcatttacagatctcagaaaattttcactgtgacctgaactctgaccagttcaaaggatttctgcgagctcacacgccttcagtggccgcatcaagtcaggcgagatctgcagtcttctcagtcacctacccgtcctcagacatctacctggtagtcaaggtaattcagtacgatctgatttgcccaatctgatgttttcattgctgtgttgttcccagcacatgtttggggtgcacgcaatctcagaatgtgtccacatatcctctgagattcactttgtttccttctcagtttaccccttttccgttctaagtaaactgtttcagatactagaaagactaggttttggagacacacagacctaggtttgagtcctggctttacaacctagtaattaaatggcattggcagtttcctggtctttctgagactgagtttcctcatctgtgaagtggagataatcacactgacctcagtggatagtcatgactacagaataaagcttggcacatcttgggcacccttctcctaattaaggagagttccctcagtgacctggtgcaaagaagctgctgtggagaaaggaacaaaatctctgggctagagtttcctaacgatgttcatgttgctctagagatgcatagttacgtgttcccaagtccagcctcttacaagctgaagcgtgggctgtggttttcaagtttcatcctccttttttttttttcttcttaccatgtcacagactgtctctaatgagagttgaaatctatggggcaattgtaagtagaagagcctttcattctaggctatactctttgctgttgtaagaaaaccagatcctttctctgtacaccaaaatgactggttagaaattaacaaacatcaggtattttacctaccttaggccagataattggtcttattgattcttttttttttttttttttttttttttgagaggagttttgctcttgtcacccaggctggagtgcagtgtcaccatgtcggctcactgcaacctccacctcccgggttcaaacgattctcctgcctcagcctcccgagtagctgggattataggagcccaccaccccaaaccaggctaatttttgtatttttagtagggacaggatttcaccatgttggccaggctgatctcaaactcctgatctcaggtgattcacctgtatttggttcccaaagtgttgggattacaggcgtgagccactgtgcccggccgtaaaatcattgtaaaaacaaaacaacaaattcaggtgtctgatttcatgtgcccccagcctcttaggtttggaacattatctagttagtacagtgttttatgtctgtagtctcagtgatcgccccatgatctcatggattccaaataattcaggtagctttgaggtcacttaacagatggcaaatgtcttttcactctagcttctttaacaccatataacaaagattatgagaggttactgtagcttgaggggaacttatttaagcttatagaagtatagttaaaattatattgctgaaaagacacttctattgttgtcaaacttcaatgtgtctccttttcgttgcaatattacttagacatacaggaaaattaaagcccactatgatagccctgtaggtaagttcacaattctctgtcagcctaggaaactgaagaagccaacactagttctatagagccaaattttatctcaaactctacttcccagtggatgactttctcttgattaatccgtcatattctgccaagtaacagtggttacccattggttcctatcacttactaaatatgttccaaaattttcaaatgtataaatgtgttcatttggcataacaaacatactaaagtgtttggataggtttaagaaattgaaatctactcagcaagacagcccctggttggctttctgtttgcttttctttatcgtaatgccatcattgttgcttctttccctttaaatatatagtaaatggtgttaaactatttagcacatccaggcagacattatttggtaagaggggcttctttcttttttgtttatattcccaggccgaacatcagggtctttactgtattttaggtagcatcatctagttcaggtgttgcatataatacggctttaagggattatttccgcttaaaagtttaattcaagattttgtgaaatttttttttaaaaagaatttgttttacaatcaaggaaagaagagtgaaaatgggattgaattggaaacttttcaaaaattgtttaaaaattggtatgccgtgcccaatttaaatatttcataagttgcgatgggcctatccttatgtaagggccacatagtttgagaaaacacaaagcagagagcctagcactttagaagtcttgcagatgttaaatttcccatcttaaagagtttacaatccagttaaaaaaacaacttggcattcaaagaaatgggttcaaattcctattttgctacatttgctgtgtatggtagcaagtttagtctgtcagtctaattggacaatgatccctgtgcctgagtggttttgaagaaaattgaaataatgtatgtaaaaacacctaccctgtacctgacataccataattaggtaaacaataaatggccatgaaatatgaaaaaaataggtatgccaagtgttaatcctaccccttctgaatagagcagaaagtagtctgttcccttaagaaaagttttaggttaatctgataggcttatttgccctactttccatggttatgaggagtcatgcatttcattacacacttttgcataaatcatgagggaacaaacaataggttctcatgtcggtctgcagctccttctcatgaagtacctggagttctccttgcccactgcagccagggcatagtatctgctggtctggtcaaatctgacttctcctgcttcctgtatgttccatgatacacactactagtgcatgaagccgtggcattccccttccttgcttcagggtcctaattaagaagttcttcatctctgttcagaatttattctaaagaccacatttttaatccattcacttcatggaaaaattagcttccttccaatttgttctacaagctcctgactatgagcttcaggagaatgggggcagtgtttatcgccaccttatctcccagctgctaccatatagaaggtactcaacaataagtaaacgattgctgattagcaggaatactggtcagtttctagctcaagtgttacgtgcttatgttttcagtgtggtgcatctctcagtgggattcgccttctcttcatgctgtggcaatgggagggggttttgaacttctttgatgagaagagagacttcctgcttggagtcctccctgaagcagatattcattgagtagcctcatgctgcttcctttgaaaccccataaatgcccctttatcatgggtattgttaaatactttgtgcctaactcacagcacctattaagtatgtgtcccttttgtactgtgttgacccaaattctttcttcaaggatcatctcaactgatgggactaaatccactggttttactcttcaacatctaagttaaattttttttgagcagagagttaggaaatttcaaatttctccttgtctttcttttaaatatggtgcccaaatttatgacaactggccagccagtcactttacctgaagcaagacagaagacacttcattcattcttattaccagcattcattcctatcaacagccagttagcaaagcaagaagctgcacatcccaatgcttttgagtttctttccaagtctgttaaatccagagaattagccctgataggaattacaagggagacaattacagataatttattcggttcagtcattcattttgtggaaggttttagtccctaacccaactttcacagagaccatatctcttttttacattgtaagcaataataaagaaaatgagttttccacttcctacgtatgtctcctgggttttgttttataaaataacttttattgctgtttttattatatacataatacatgtttattgtttaaaatagaaaatacacataagcaatgggaagaaaataaaaatcacacataatcccaccatagaaagttaactactattaacacttgctgcatttgctgagtatctactgtcacccttttaatatgcctttatgatttgttaaataaaattgtatgctattctttatataaattttttaataaaaaaatatgtatcacagatagcttcctatgtcatcaaatattgtcataaaatgtaattttgatggttgcatagattcctttttatggatgtaatttatgtgccttattttaatattctttttattggtagattgaaaaagtcctgcagcagggagagattggagactgtgcagagccctacacggttatcaaagaaagtgatggtggaaaggtatggtaatttgagtgttgttaaatggagacatcttagaagaagcaggtattttcagaagtgttacacaaatagttaatgggctttagtccctaatgtgtccctatataagacactactacattttaattaaataaaagaggaaaagaaaactggtcaccgatgatgactttttttttttttttttttttttttttgaggcagtgtcttactttatctcccaggctggagtgctggagtgcaatcacggccccctacaaccttgaactcctgggcttgaatgatcctcccccttcagcctcttgagcagctggtactacaggcacatgccaccatgcttggctagttttttatttttttttagagatggggtctcactgtgttgcccaggctgctctcataattctggcctcaagtgattctcctgcctcagcctcccaaagtgttgggattacaggcatgagtcaccatgcccagcctgatgatgattttttagagaaataaatccttgaattttctaatgttgacatacagcaaggtctgactgcataacttgattggggcaaggccaccccctgttgtcttcattctgaggctctgactcagctggttgggaggtccgtggagaccccaaaactaaacagtgccagagctctcctggccttcctcaacagcatgggccgctgccctttcaggtatgcaaataactgggaattggctgccactaccatgcattatatatattcattagcacagcataggtgttgagcctatgaaaaggatatcttttctcaacagcaatttgcaaagattcccagtgtgatttttaaaacatggccttggccgggcgtggtggctcacacctgtaatcccagcactttgggaggccaaggcgggcagatcatgaggtcagaagattgagaccatcctggccaacacggtgaaaccccgtctctgctaaaaatacaaaaaattagccgggcatggtggcacgtgcctgtattcccagcttctcaggaggctgaggcaggagaatagcttgaacctgggaggcggaggttgcagtgagccgagatcgtgccactgcactccagcctgggtgacagagtgagactctgtctcaaaaaaaaaaaaaaatagcctttctggaataagacttaccttattagtattgtactctacagactcataaatgtcaagtaagatttattgaactcaaggcattttttttttaaaatctgtcttttattctgaactcagaaagaacaccttggaagtattgtaaacttcctaaggagttgttaggaagctttttagaattttttggagttttccaaggtgacttttggagaaacaggttcacttgggagcttggtagatgatatactaaacttgatttcaagattcttttatgcaaatccaagtcacatagctagccaccaaaagaattgataatctgatgtaatgagtctctttttgttttcgttagctaaaaatgtattttactaattaaatgtagcctttttgtaaactcctcgttttttaatctttatttccttatcagctagacccaagtgcatcatttttctgcctattcactgtttttattttttagtgggaagatatgtttttactctttttaatcagtagggtttggattttggagatggctgtcatattcaggtcagaggcagttgacttggtgctgatgcttgtttcagcttgtttctttccattttcctccagagtaaagaaaagattgaaaaactaaaactccaagctgaatccttctgccagcgtttggggaaataccggatgccctttgcctgggcacccataagcttatcaagcttcttcaatgtctccacccttgagagggaggtaactgatgtggactctgtggttggtaagattttcacctgcagtgggaaagggagggctccccagtgtgcgctgcccaggtccacagcttactagcggggactgggggcacagtgaggtgtgggaagtggggaggcagaaggagataaatagaatgaaacactgttatgactggattacgtagatttggacggtgatctccaaaagaaattatcacgaacattggtgaagattaagtatactcttatagtaagattttctagatggtatgacactttaaaaagctgatttttgctagccacccgctctcaaaagtaaaactttaacaagaaaatgtagtaaccatctgtagtgtgttaagcagagacaccatggtcgactcctaaacctaaaaaaaaaagcctctgttacaaaggcttcaaaaagcaaaactcaacaggaacagggcgtggtggctcacgcttgtaatcccaccactttgggaggccgaggtaggcggatcgcttgaagccaggagttcgagaccagcctggccaacatggtaaaaccctgtctctactaaaaatacaaaaaatttgctgggtgtggtggtacacgtctgtaatctcagctactcgggaggcagaggcaggagaatcgcttgaaccagggaggcgaggttacagtgagccgagatcaggcctctgcactccagcctgggcaacagagcatgactttgtctcaaaaaaaaagaaaaaagagaaaaactcaagtttcccagcaaaatttccagttcgttaaagtttactttgccaagtgcaatgaaaaaatgggcatccaaagaatatttactgttttagtttatttagcatatttctttttcgtcatctcacccgtgatctgaatcattcattcctacactgcttggtgtagaaattttcaaaagggttgcaaattttcaagtagacctgcccatatcacctgtggtggggtttctctttccctaaatgcttttgtatccaccaaatatagaagtccatgttcacatcttttcatgcattccttaagctaaggcttaagccacttctgaaatactaccttgagcagggaagtggaggaaagggcattttgtgattgctgctgctattttggagttactggtacataatcaccagtcagaactcctgggttatttctggttcgtcaataacaaacctcactttaccacatcctgatcttcctgccacagctttctttaatgccgtctatgtagacccaagtaacttattgataagagttatgtatagagcttagagggcacacaagctaggtaattcaggatagggcatgctgaggcctcaatcatctctaggtcaaggataacctgacaacagagactgattcttaaggagcaaccagaagatgcaaagatgtcatgtattatactgaggcagaatggcaagtttaggtgggtagaggtagcaagaaattctaattcaacatcatggtaagaattaaggataagaagatactcaaagacgggttggaactgctctagttctaagcaatttgattatttacaagagaacccatgagtttttgcaatataaaagcaacaagatctccacccaaatcccaaaaggggataagaaacaactgggcaaactatcagggtcccagcccaagtctgagtgtgatttggggttctaattcccattgggcagatcacccaaggcagaaactcagtcttgctgcctggtccacataatgagagcagaggaatgctgggattcagagtgtacacaggctgaccccagcatgtttgggtcacaatcacaaatgccttcaggggcatttgagtacatgcctctcccagtggaatgcaaatatagaaataaaagaaaagcaaacactgtgctgactaaataaagcttatcaggagaccctgttctggctatagctctggactcttgccgggtggcatttgggctaccctaatttccatgtgggaggggcccatggctgctcctggcctctctcctctggtcggaggaggattaaggacaccaacaggaggactaagaaaggtaggggccaatggaaggacattttcattcaaaacaaggatggccatattcagtgttcctgatcagtgactttaatcatacatattgtgaagttaataactgctgtgtgtttgaacagaaaggcatactttggagtgacaattgtttttcttaaagggagaagctcagtgggtgaacggaggacattggcccaatctagaaggctttctgaaagagccctctccttggaggaaaatggggttggatccaacttcaaaacctccactctgagcgttagcagctttttcaagcaggtatctcttcacattacagtgtgtctggatttttccccatactggcatgggcactggaacccacaggaggaggatacgtagtgattaagagagcaaattagttaagctcactctcttagttcattttctgctgcttataatagagtatctgaaactgggtaatttaaaaagaaaagggatttgtttctttcagttttgaaggctgaaaaatccaaagttgagggcccacccttggtgagggctttcttgctggcggggcctctctgtagagtcctgaggtggagcacggtgagcagctgagcatgctagctcaggtctctcttcctgttcttataaagccaccagttcccctcccatgatgcagattaatccattaatctgtgaatggattaatccagtcatgagggcagagtcctcatgattcaatcacgtcttaaaggctccacttcccaacactgccaccatggggaccaagcttcaccatgagttttgaaggggacattcaaaccacagcattcacaaagcctcaatttcattagccagaaaacgggaacaatagtacttaacttcatgtggctagcaggaaggtcaggtgacatgagacctgtcaagctcttcttagagtgcctggaatacagtaagtgctcaatgaatgttagctattttaactgagagaagggttaggttttgttccttgtgataccaactatcctatttgaactatcttggccaatccattcattatgctatgacaacagtctggctgggccatctccttcccggtggatctcagggtttcttggcctggctattcatgtgcaagtttccactttcactactgcttgatgtgcaagtttccagggctccctgcttgctcagagagggtgaccattccagatggtactctttgttagctcagtaaacatcaagactatttaaaaaaataaaaaacttcctagacttgtcaacggtatagagacagaaagtagaatgacggttgccagggtctagggatagaggggtggggagtcactggttaaagggtacagagtttcagattttttttgcaagacaaaagcattctggaggttggttgcacaacaaagagaatgtgcttaacactactgaattgtgcacttagaaacaggtaagatgggccgggcgcagtggctcatgcctgtaatcccagcactgggaggccgaggcaggtggattatgtgaggtcaggagttcaagaccagcctggccaacatggtgaacccccgtctctactaaaaatacaaaagttagccgggtgtggtggtgcacacctgtaatcccagctacttgggaggctgaggctggagaattgtttgaacctgggaggtggaggttgcagtgagccgagattgccccactgcactccagcctgggtgacagagtgaggctccatctcagaaaagaaaaaaaaaaagaggtaatatggtaattttatgttagttatattttgccacacttaaaataaactcgcttggtctgactctgttttggaaagttttccatagctacgcagtcttcgtggagcatttaaaggggttacattaacaaactgaaatgcaaaagggatgctgagggcgcctgtgcaccgtgccacatcatagaaatagtaaaggtctgaaaaggtttctattcagcatacatgtacccttcccaatcttatgaccttggaggacaaggtacttaactaagtctggatggtctcactgggaataagacatatctacccacttaccttactgggttgttgtaaggattggagatcatgcatgtgtgctcctgacccatcttgggcatatgtgggggtggacagcatttatacttaaccttgttcgagacaaatgtgaagaaaatgagatggaaagatgctttctccaccttcgaacatttgaagaagaaagtaaacttattctgtattgttccggggggtaatactggcatcagagggtgagagttatcggggggaagcttttggcctggttttctaatggtcagacgggcttccttagaatgcagcagatgccccatccccagaaggactgataagaggccgaggcacagtgagtcacagtgattgagaaggatttaacaagaagtggagctcagtgatttcagagctgtctataatcctaatttctatgaaagacttgtgagaataaaacttaaaggtaaaaatcttcccagaaatcgtttgtccccaacccaagagtcaaaggtgcatctacattaactctgacttttctcttggcaggaaggagatcgccttagcgatgaagacttattcaagtttttagctgactacaaaagatcatcatccttacagagacgagtcaagtcaattccaggtgtgaatgacttatctttatcctctttagctgtgccaaaactgcttatcgttagacacagtctttgtctaatgccagaatttataaaatcatgtttgccaagtgaaatgtgagattttgtgttaggggttaagaatctgaattgttctatgtctttggcaaacctattaatgtttttttaattttcttaaaggattgatttagtaaacaaaccttgtgctttagatctggtttctcagataatgagataattgtttaaacagaggagcccctttaatcaaataaaatattatacttagtattaaaaaagtaaatgtgagatgctttggtagaaggcaaaggcatcttccttatcctcactcggcagccctggaggtacttctgtagcatcctcaggtccagggaagccagtttgtgtttgtttttgtttttttgagatggagtcttgctctgtcaccaggctggagtgcagtggcacaatctcagctcactgcaacctctgccttccaggttcaagtgattctcctgcctcaacctcccgagtagctgggactacaggtgcctgccaccacgcccagcttattttttgtatttttagtagagacagggtttcaccatgttggccaggattgtctcgatctcttgacctcgtgatccacctgcctcggcctcccagagtgctgagatgacaggcgtgagccaccacatccggctggaagccaattttaaaactcccaatttttactgctagcaatgcagggaagttacttaacaatgtaaaattatactgtggtaattcaggaaagaactttaaaaatcctctaatccattccttctcattttacaatttcttgctttatattttattttatagaggctaaatctcgaaagttatcatgacacacttttctcaagctgtaggaaattagctccaaaacttttttacagtactatagtttgttcttattttcatgaaagaaacacagtgcaacaatctttcttgattccctcataacatgacagtttctttactagaacattcctattttctctctttaggcttgctaagactggagatttctacagctccagagatcatcaattgctgtctgactcctgaaatgctgcccgtgaaaccctttcctgaaaaccggacacgcccgcacaaagagattttggaatttccaacacgagaagtatatgtccctcacactgtgtacaggtaagaaacacaggctcgggctgggcgtggtggcttacaccataatcccataactttgggaggccgaggcaggaggattgcttgagctcaggagtttgagaccagccttggcaacatggcaaaaccgtgtctctacaacatatacaaaatttagctgggcatggtggtgcatgcttgtaatcccagcaacttggcaggctgaggcaggagaatcgcttgaacccaggaggcagaggttgcagtgagccaagattgcactactgcactccagcctgggagacagaaccagactctgtctc

SEQ ID NO: 15559 - DNA, 71783 bp, Homo sapiens
cagcgccgaccgacagacgaggtttgcgcttggctgggcatgttccgcggctactctgcggcgcgccaggcccccgctttccgcaccccgcgaccctagaagccaccgaaccgccggcgggccatggccactctgccgagcgcagagcgccgcgcgttcgcgctcaagatcaacaggtaagacgccccccgcggcgcgcaggttgcggccggacagcccagcgctggtgtgaagcggagcttcgctgcaggggccgaggccggacgagtccattcgcgtccgcggcggggcgcgcctgagacctggggcgcccggttcccgaggctgcggcggtggagccgctggacgcgcggcggctcctgcgctgggcccggcgaggtcctccccaagaatctcggtgctcctggatgtcctcagccgccggggatcccttccccgaacaacctcgcccgctccgccctccaggttcttacaggtggccgggtcccagaagggtgataggcgcctgggtaaccgtgttgggcgcgccacggagtgtctcataaacggctccttcctttgaggcaagtctgagcgcggggggaagaagtgaagtggctgaaattagagttgcgtttgaggcaggctgcaagccttctgtcgtcctgagcaaggctccgtcctcgcctgcttcattattccagaaagagcttggctcctggtggcatcgctatttttataccctggtccaaaggagccatgaagtggaaaaagtgattttttaaaaaatctacacttaaataaaccaaaagaaatggcctgtggctgacattttgagatttacagaactccagcaaaaagctaaggactgggggatcccaactcaccatccaattcctaatcaaagttgcacaaactaaatatgtaagcacatttactgctcaaagttctcagtaaaggtgctttaactgcagtttttcctccactaaaaactgctgacaagtaattgggacatttttgtcttgccctgagaaagctagactgtctagttaaaagataataggaaactcattctaaagtgtcaacttattctattgcccacagggctgtccgatttgttaatcttcacttagctgagcctgtgaaaggtggattccaccgtaggttcatctttgtgctgttagtgtgtgaagaggtttgaacaaggaattaaaagcctagaaaaacaaggcgataaggtcttctagagggcatatcgagctttattgacgattttatttccacttgatacgtgactgccagcaaactgtttctcttaccttactatttcgtcatctgtaaaatgagtttaattatttatgtatattgcatattaatgttggaggccaaaaggtactagtcaaaaggcataaagaggctgggtgccatggctcacacctctaatcccagcaatttgggaggcccagatgggaggattacttgagcccagagtttgagaccagcctgggcaacatagtgggacccctgtggctacaaaaaaataattttaaaacattagccaggtgtggttgcatgcacctgtagccccagctattcaagaggctgagacaagagcatcgcttgagcccaggaggatcacagctgtgatcatgccactgcattccagcctgggtgagagagtgaaaccttgtctcaaaaaacagacaaaaaaaaaaaaaaaaaagcaaaaacaaggcatgaagtatatcagggatctccctatgggaatttttttctacattaaggttcatagctgttgcatgccaggaggggtaattcattcaaggagtatagggaatcaaactgaagttactgatgggtgtattatttgctatagctcctgatcctctgtctttgtgaattttagatcaggaagtgtgactggggcagaaagatgttagaaactatggggttgggcagggttgatctggggtgagtggccgagacccggactaatcctacaggcagtcttgcaagcaactgcggggtcggtgtcacctgggggttaagaataaaggccctggttagtgtctgatctgcttgcaaattggctctctgctacaaagtcactgtgcaacattggacatgttacttaacttctctaagctttggtttctttatgtgccaagtagagttgatcatagtacctacttcttatgactgtggggaggattaaatgaataataggtacaaagtccgaattgccaagtgctggatgtgtaacatacacattggaatttagagacagtacagaaaaaataatgcaaaatgtcttgttaatgattttcatgttgattgcatgttgcttgtagtgtctggctcagaataaatggtgaataattcttagttgccatcattaacattacaatcagcttcactgctgtcattatctccatcatcaccatctttgagagcctaagatagaaaggtaggaaggaaagctgaagttggagagcttcaggcagagatcagtttgggttaggtatggagatgccagtggctggctgggagctttcttggggccagtgtttctccgcctgtgccttccatctggtgctgagaacccaaaacacattcaatggaagaaaatatgtgatgaaatctgatcaagaagagccccctcaagtttaataaagtataaaaggttctataatcctcaggcaagaaaatggattggaaattcgtattcttagagttctgttttcctttttgaagcactctgtgtgttgtgtgggagagttatgctaaggagcttggcagaaattattattcaaaggagcagattaataaggacatacctagtattcatatatcatttaatttcaccatttattgtttacttattgtgtcccagacactatattatacagttaatggattttatgattaaattctcacaaaaagcctatcaaactcatgaagtcttgtacagaagaggaaaaggaatcttggagatacagctgcacaaggccatgtaattttttcaagaccatacaaccagcaatggcagagctgggattgcaaactgctccaaagactgtgctcttaattgggccgattgttattttgatgcatatgtatcccaagaatttcctttaaagcaagaggggaattaatttttaaaaaatcatcattttggtagcagcattggcaaagtgttctgtttctgattagtgtttaatatataaacattaacaatgtgatgttttgcaatgttgaaggtggaaaagaaatgttttcccttacgtgcctacctattattttttttaaataggtcaaattccaaaagtaagactgtgttgaaatatggccattagtacattcagcatgtgctcatgtttttcaccttactactcagaatagtgtaaactatctcttaaaaatatttgtgggataaaaccagtgtgcttcctgttaatgaagtattcaaatctgatatattaaaaatattatttgtaaagcgttcagttctgaccacaccagtctccagaaggagtgagcagactatctcacagtctgagaagaaaggtgaaattaattttcttgtaagtgctatatacttgtcttcatttccatttttttgttgctgacttgcgtgccaaggaaagactagatctaagttaggcagttcgtaataacatttgcgtttgggatttcaggtgctgctgcattaaatgtcataacatggtacttgtgggaacatctagtcttgttaattgccttttttcttactggaatttagtgcctttgtagattataaaaattattactagtactctgaaaatttattaaacaaaatcttagtgtctttcaaatacagaatagatgtaaaatttgatcaaatattaaagtaaaataagaaccttggataaagaggacgaaagtgtagaatgcagaaaaaaacattaaccctcttgtggacagtcaggattgaaaggaagaaaaaataatggcttacacttctagaatgctttctatgtggcagagacagttctaaatatttacatatcgtaactcattcacctctatgagataggagcaatgactatctccgttttacagatggagaaactgagtgcagagaagatatagaaattgtccaaactcacaaacaactaattaaggtcacagctgagattcaaatgcaggcagcctggctccagagtcttctcttttaatcattataccatgctgccatctcagttttattttaaaataataataggtaacatttattaattatttactatgtgctacatattgtgctaagaactttatataccttcatttcgtcctttcagaaaaggaacaaacagagctgggtgcactggctcacgcctgtaatctcagcattttgggaggccaaggcgggacgatcacctgaggtcaggagttcaagaccggcctggccaacatggcgaaaccccgtctctactaaaaaatacaaaaattagccaggtgtagtggtgtgcacctgtaatcccagctacttaggaggctgaggtgggataattgcttgaacctgggaggtggaggctacagtgagctgagatgtgccactgcattccagcctgggcgacagagtgacactctgtttcaaaataaaataaaataaaaaataaaaaaggaacaaagtattaggcataataatcatcaccagagagtgattttatgaaagacaaaaacaaggtggcaagaagagagaataaagttacataaagatagcatttaagaacaaccacaggctgggcatggtggctcacacctgtaaccctagcactttgggaggcctaagctggtagatggctcgagcccaggagttcgagaccagcctgggcaacatagcaaaaccctgtctctacaaaaaatacaaaaattagccagctgtggtggcttgcacctgtagtcccagctacttggaaggctgagatgggaggatcactcgaacccaggaagttgaagctgctgtgagcagtgattgcgccactgcactgcagcctgagtgacagagcgagactctatttcaaaaaaaaaggaacaaacccaataattttgggcataacgaccagagcacaatgagctacagagagctttctgagaagtatttgctaattttatctgcaaagataatacaagcataaaaatatatgtattcaaatgtatagatgtgtatctgcagtgagagcagagctgttcctcagtagtgggggtggctggcagagtgaggtagtgtgctttcaggaattgctttatttgtctgatgtgttctagaccaaagaccaacagaggggcttgggcaatcagacacagaatttttggcctttcacatttagaatcggttccttccagattcttggaaaaggtccatttgtgctttaggcatctagtgctattctgaagatgccttacaaaatgtatgctgaaataaccttctaccagggtgaattttcttcatttggagttctttgagttctgaccatttatgtatattgatgaagctaatgtttacttcttcatagaccagtggaaagaaaacgtagtaacatgtagttgcccagggaaagatgaagaactcaggggaccaagtctcccatctcaactccccataaaggtagtgatggaatgggatgatgttaaaaacacctcaactttccgtcctctttaagggaccgtgagaaggtagggatgttaccatactcagacttcttgctgagaaagctaagaaacaaaagcatttagtttttttcagtggcaggtgcttattaacgtttggcctatttgataaagggttaaagcaacaggaatgtgctactgctgttcccacaagcagtagtctaatttctttctttttttttttttttctttttttgagacagtcatgctctgtcgcccaggctggagtacagtggggccatctcggctcactgcaacctctgcctcccggattcaagcgattctcctgcctcagcctcctgagtagctgagattacaggtgcgcaccaccacgcccggctaatttttgtatttttagtagagatggggtttcaccgtgttgttcaggctggtctagtcttacccagtcagcagcagaaaggctctctgggctctaggtaaacacatgaaatttatatagtgtgtttaagtgtggttcctgtgcttctggagttggcacagtagtggtaccatttgctgtatcgacaacagtgggggtatagacgaaaaacagattgacacctctgaaagtatatatgaacacatgtcgatgcagcatttctggtgaaactaagcaaattgataaagttggcctagggtacaagacattatgtcatgtcccactgcattatgattaaacccaagattagaaaggagaaatgatggcaacagaaccagtttctccagctgtctattctcatgttcatcatcacagataggaaagggcagccggccctctgcatctgtgggcacatccctggattcagccaaccacagatcaaaaatatttggaaaaaaatgtagatagttgcatctgtactgaacatgtacagacttttttcttgtcattattccatacaaaatatagtataataactatttacatagcatttacattgtgttaagtattataaataatctagagatgatttaaagtatacaggagggctggccaccgtggctcatgcctgtaatcccagcacttttggaggccaaggtgagtggatcacttgaagtcagaagtttgagaccagcctggccaacatggtgaaaccccatctctactaaaagtacaaaaaaaaaaaaaaattagccaggtgtggtggcaggtgcctgtagtcccagctactcaggaggttgaggcaggagaatcgcttgaacctgggaggcggaagttgcagtgagccgagatcgcaccactgcactccagcctgggtgacagagtgagactctgtctcattaaaaaaaaaaaaatcatgaacaactctgcatgtaaatcaatacagagctgcattataatttacataggctgtataaaatcctgttgattagatgtaaaatgatttattaaattaattttctattattgggcatgaagataggttccaggctgggcacagtggctcatgcctggaacctgcctcccggtgctttgggaggcagacacaggagaatcagttgagcccaggagttcaagaccagcctgagcaacatagtgagacaccagctctacaaaaagcaaacaaaacattaggcagacagggtggtgcatgcctgtggtcccagctacatagaaggctgaggtgggagggtcacttgagaccaggagtttgaggctgcagtgagctatgattgcgccactactctccagcctgggccacagagtgaaaccctgtctcaaaaaaaaaacacaaaaaaccaaaagagataggttctgacttttcacaatagtgtatagagtttgatggagcagtcttatacatacttttttctgcgctagtgcaaacacctccttacaaatttctaacagtataattggtcataggaaagaaacatttttcaagcttttgattgccaaattgacgcccagaaaaggtatacctgtttctgctcctaccagtggccctacgaatgctcctttccccacattcacacccccaccgagttttatcattcttttaaatctttatttgccagtgttgacctcttctcttaaatgcctgtaacctcttcctgtttagcttctctcctaggtcagagagtgaactctgaagtcattctttagggattaaaatagtcatgcatttctccttttttctttgccttacatgcaaccataaatggtgagaacttctatcctttttcactttctgcttctgttcctttaataggtggattaatgataaaggtagattgttcaaacaacttagttatttcttaattttgttgtaagctctagttgccagactttaaactgtgctttttactttgcttaacaatgtaatccaatctacctcctcctttgggtgcctaagccatagcccttttaaataaaatagcaaatggaaaatcagaatccctttctatcgcaaaataagagtccagattacataactcattgtatgtgttttcacttggatgagagaatagagagtatggacctctttcatactttttttttaatgttccttttcctctagaattggtttctggggctaaaaggaaacagtagttagtaccactctgctcagaaacctcaaaaaacttcgacttctgtcattctcatcaaagggcaaaattcattgttcttctgtgatagagaccaaaaatacaaatagctaaactggaactaaattaagaaaaacagaagttaataaactccaccgcctcactcccatctcttcgtaagttagtaggcttgtaagtcctaggctggttagttcattcatttgttcactcatgccagccattgaggattattgtgttctaagtgctgtgctaagccccagaaatacaaagacaagtgagtcatgggcctgcctgcaaggagtgaggagatttactcaaaattgagagctggaaaaagaaaggcactttccctggcctcatagccctccgtgacttcaaagtattcctctctggggtcatgccactagggataatagcattatccaaaaacatttttggaaatccttttagaattattctcagggactggagtacatttatttttaaaaagaaacttggtgttttaaaatctttttttttttttagggagaatctgctttattatttgagaagtttcaaaaaatatagaaaatacagatgataatatggcaagtatctaaaggtctccacttaacagaattaacatctgttaacattttgtcacttttgctttagttgttttttttttaattaaaaaagagaacattacagataaatgtgaagtccctgttattctgttgcccatttctgttctccctgctgctccctgagagtactaacacaaaggtgtacttctggggtgtgtgtgtatatgcatatccataaacaatatatggtatagcttctggagggatccaaagtcattagcactcaagcaagcctattaaataaaataatatcagcttgagttaaagataacatatagccgtgaaataacggagctgatttttaggtaccttgtcaaatagttctgaaagtaattgcaaagaggagttccaaaagtgagttcagaaagacagctttatcagaataaattgcatggtactgcatacaggaaactataaagaacaacggttatttagaactgttcattctgacagtgtttttcaattactccttaatattataaccacttactcatttcctgaaatcaccaggaaatttttcaaaaagatttttctcccccgatgaatatacccacgatttgcatttgacccaagataagcagttgagtcgataacatgttaatttttaaatacatggttttaaaacacagaataaaaattctacctcattgcttggagactcaattaaggagagtatgcacattagcaaaaagaagatgtgatatttgctcagaagtcttgaagtggatattttggccttcgtatggctgaatggtcaagcttgactctctcgtttgctcagggaggcccagtccctctgctgccacgggtagaaatactttttcctaaatcgctgcttcttctcactgccatacagagcaatattcaggacacagccaaaaccttctttggcagacctttttgagttctctctactcagctttctgctgtgtaatatgagcactctagagaagttgggctgtcctcaggaaattacacttggggtctgtggttccccaggaagacaaactggagctccctaaggggtactagtcatcatacggcatttatactagcattgcagtccactttcacctatgcaagtagaaaaactcaggctcaaagtccactgacaatgcaggagtcccttatctgctggttaacataaatgttgttttaagatgatggccatctgttgtctgtgagaacaagactatcacccacctgttgacatgctggctggtttaatatcttactctttcattccaaataactacctggtctcacagatccccttagatggggtatccaatttacctcctgtaccttattctctgtccaataatttcactcaaatcaacaagatattttattgcctatgacttcctctaggtattacgggagattcaaaacacaaacagacaagcagcctatgccctcagaatccagctggggtgagtgggtgactataaatgcaaaagttagagagcatggggaacagtgtttgattgtgtggctggggaggggtaaggacaaaaactcagagagagagaagcctgtagccctggctacagaagggcaacacctctgaggagatgagtctcagctgggccctgaagggaggtgactcacagatgaaacaaacctggtgggaagaatagttagcagtgtgcagaaggcattggaagggattccaggggaggagtgaggagggagccacagtcattccgatgtgaggtagtgagatctgggattagactgggtcatcagaatggaaaaaaagggcctgcttctgcagacagtttaaaggaatcagctggatgtgggaagcaactacatacttattcattcattcatttcatgcatattgcttatagcctactatgtgcctagcactattctaagtgctgaggatagagtcatgaataagatagacagggttcttattctaaaaaaagtaatataccagtggggagacaatgaagaaataaaccactaaataaacaaggaaacatcagataaaataagtgtgatacagagaatgtaaacgggccattgagagggcatggattctttagatgggatggtcaaggaaagcatctcttagagaaaaacctctgagccaagatcaagcaggggaatgacgaagcacatgactgaggcaggagtaaatttgatgtgttggaagaaaagcaagaactggtctgtctctagtggagtgaatgaggggagaggaggagagctgaagagggaagttagcaaagaacgaatcacataaaagccttaaaggcaatggaaaaaatttaaatgttattcaaagtgcaatggtgtattagtccattttcatactgctatgaagaaatacccaagactggataatttataaagaaaaaaaggtttaatggacttacagttccacatggctggggaggcctcacaatcatggcagaaggtgaatgaggagcaaaggcatatcttaaacggcggcaggcaagagagcgtgtgcaggggaattgccctttataaaaccatcagatctcgtgagacttattcactatcatgagaatagcatgaggaaaaacctgcctccatgattcaattatctcgcacaacatgtggggattatgggagctacaattcaagatgagatttgggtggagacaaagccaaaccatatcaaatgggatggtttatggagcagggcatgatgcgattgacttttgtgtttaaaagatctattgtacaaagaagcaaggaaaccagctgggaggcagtggagaatccaggggaaagatgacgatggcaaaactagagagcagagctgagaaggagagaaccaggcagctctgggataacattctggagctagggctgacgaattagatatggggtggggcaatgaaaaacaaaaaaaaagagaaatcaagatgtctccagggttggatattgatgcttttaacagagattgaaaagactggaggagaagcaggcttttagggtgaatcaagggtttaactggggacatatggagtctaagatgcatgttagacattcaagtagaattagctactatgcagttttatttaggaatctgaaactcaggggagaagtcaagactggatatttaagtttgcaagtcaataccaaacatatttttacataagaaggaaaaaatattgatatgattttgataagtttttaatagccagaaagctatatgcgtaatatggtatcattttaattaaaaaataaatatatgcataactctctgcagagataaatgatcaatacatataacaaggagagaaccagaaggacatacgccaatatgtcatgagtgttatctctgggtagtagaattattgatgacttttgtgtacttgggacatgcatgtatgagtgtatgtatgcatgcatattttgcaagttttcctcaaaggatgcttttgtaattggaagaagaagcaattataaaataaatggcacaagatttccatcctggtcaaatgggataaggatgatgccaatgagaaattatgaaaattggaaattagacttagttttggggggatgattttttacttccctcgtagaggttttgtttaagacgatgtagtagactgtacctttacatatatttgctgtccctcccgatgggaggattttacttttcacctgttgaaggtgatgtggtcacttggaggtgaagagatagcctggactttgtcacattatctttctcctattctaaacaatctgcagcgttccaggtggtggatgatctgtcatcctgcatcctggagtaaagatgattaaagcagagctgcagctgccctctgaaggcctttgtttttgtaaaccactgagatttttgaattgtttgttatctcaccataacctagcccaccctaacacagatgaacataaaatacagaacatttctattgggcggcttgaaatacaggcttggggcatcagtggtaggtcagcatggaaaatgttgattaaaaagtcatctgtgaggtggagattgggactgaagaatggataaattttctgaatggaaagtataaggggaagagaagaggaatgggcctagaggaagagtcactgtcaatccatacaaaaagaagagatacgaaaagataggaggggggatttggccaacacatggcagaccgttgtagtatcagaaaagagagctaggagggtagttacaaagatcacatgccaaattatgagggcaaagagccattggatttaccctgaaggtggtcattgaaaacctctgaattagcagttttagcggagctgtggggaaggaagtcaggtttcataaggttatagagggagtccatgcagaggaaatagaggaagctggtggaggccactcctttaaaaagcctggatgaggccgaagagaaatgggacaagtggtaaccagaaggcccctacaaggctgtgacttttacacaaatatgacatacaatgctgaacaaaggatgtgctgatcttacagaggaaggatgtgttttattcccaaaaaaaactttacatatgggtaaagttattcaagagaccctgtgctgtctaatatgcaacaaatttttctttgcaccagcattaagacttctaacaataagtaaaatattctatttagatactttttacaggagattttgaaactctgatgacactgacatactacctttcagaacatggtactgtttaaaattttattatttttatatttatcttcatatgtttaaatttgaaaaattacaggaaagagtacttttataattatgtttttctgtttacaaaccacctcctgtgtgctgaattttgcctccccaacatttttcaggggagcatggccctactcgcactttgagttcagatttctggccttcagaactctgagaaaataaatttcttttgttttacgctatccagtttgtggtagtttgttacagtagtcctgggaaactaacaaaccaccccaaagtttagtgacttaaaacagccattattatttctcacaattctgtgggttggcaatttgggctgggctcagctggacagttattctgctggtcttcctgtagacattcacatggctgccattatcgggtggctcaagtgaagctgtagggtctaagatgggctcactcacaagtccaggaccttggtgctgactgttggctgagctttccctcttcacacggtctcttgttgttcagaaacctagctggtcttttttgcattcttagctggtaaagggaacattctaagagaaggaaggtggaagctgcaaggcttcttgaggcttaagtctagaactctccaacgtcacttccaccacattcattggttaatgcaagtcataaggcaactcagcttcaaagagtaggagaatagaatcaacctattgaaaggaggggctgcaaaatagttggtcattttaaccaaccacagcacccaaccaaaaaaattaatactatcccgtttcagatttcagaatgtttaatcagaaggccttgtctttccctacgtatatcacaatacccattttagtggcagagaaactgagaccaaataaaactgactcctttaaagttaccaagtgagtcatgctttgtgagagacatgaagacaactatatgtctggaagagctaaacatagtcctgcctggaggcaggtatatgaacttaataatcccttgagatgctcttaaatcccataattacactgatggactccagattgcagagctgtctggtccagagataaagcagcggtttgagagtatcagagagagaaggtgcctgaaaattgccacatgtccccaaaggcaggatttgaggctaaattaaatgataaagagttaccaagctctttattctcaagagttaccaaataagcttagaaactcaatgactgctgctgtctagtgttagttctggaatgggagaattaaaaatgagtagaaaaagaaaatagagacagagagactaacatatctgaaagataggtgctgtgggcagtcttagaaggatcacccctatatcaattaggattgcttttagctgctgcaagtaacagccaaccaaaccatccaatggtttaaacaaattaggggtttatttttttcttttcatttatttatttatttttaaatttaattttattattattattatactttaagttttagggtacatgtgcacaacatgcaggtttgttacatatgtgtacatgtgccatgttggtgtgctgcacccattaactcatcatttagcattaggtatatctcctaatgctatccctcacccctccccccaccccacaacagtccccggtgtgtgatattccccttcctgtgtccatgtgttctcattgttcaattcccacctatgagtgagaacatgcggtgtttggttttttgtccttgcgatagtttgctgagaatgatggtttccagtttcatccatgtccctacaaaggacacaaactcatcatctttatggctgcatagtattccacggtgtatatgtgccacattttcttaatccagtctatcgttgggcatttgggttggttccaagtctttgctattgtgaatagtgctgctataaacatacgtgtgcatgtgtctttatagcagcatgatttatagtcctttgggaatatacccagtaataggatggctgggtcaaatggtatttctagttctagatccctgaggaatcgccacactgacttccacaatggttgaattagtttacagtcccaccaacagtgtaaaagtgttcctatttctccacatcctctccggcacctgttgtttcctgactttttaatgatcgccattctaactggtgtgagatggtatctcattgtggttttgatttgcatttctctgatggccagtgatggtgagcattttttcatgtgttttttggctgcataaatgtcttcttttgagaagtgtttgttcatatccttcgcccactttttgatggggttgtttgtttttttcttgtaaatgtgtttgagttcattgtagattctggatattcgccctttgtcagatgagtaggttgcaaaaattttctcccattctgtaggttgcctgttcactctgatggtagtttcttttgctgtgcagaagctctttagttgaattagatcccatttgtcaattgtggcttttgttgccattgcttttggtgttttagacatgaagtccttgcccatgcctatgtcctgaatggtattgcctaggttttcttctagggtttttatggttttaggtctaacatttaagtctttaatccatcttgaattactttttgtataaggtgtaaggaagggatccagtttcagctttctacatatggctagccagttttcccagcaccatttattaaatagggaatcctttccccattgcttgtttttgtcaggtttgtcaaggatcagatagttgtagatatgtggcattatttctgagggctctgttctgttccattggtctgtatctctgttttggtaccagtaccatgctgttttggttactgtagccttgtagtatagtttgaagtcaggtagtgtgatgcctccagctttgttcttttggcttaggattgacttggtgatgcaggctcttttttggttccatatgaactttaaagtagttttttccaattctgtgaagaacgtcattggtagcttgatgcggatggcttgaatctctaaattaccttgggcagtatggccattttcacgatattgattcttcctacccatgagcatggaatgttcttccatttgtttgtatcctcttttatttcattgagcagtggtttgtagttcttgaagaggtccttcacatcccttataagttggattcctaggtattttattctctttgaagcaattgtgaatgggagttcactcatgatttggctctctgtttgtctgttattggtgtataagaatgcttattatttttatacattgattttgtatcctgagactttgctgaagttccttatcatcttgaggagattttgggctgagacaatggggttttcaagatataaatcatgtcatctgcaaacagggacaatttgacttcctcttttcctaattgaataccctttatttccttctcctgcctgattgccctggccagaacttccaacattatgttgaataggaggtgagagaggacatccctgtcttgtgcccgttttcaaagggaatgcttccagtttttgcccattcaatatgatattggctgtgggtttgtcatagatagctcttattattttgagatatgtcccatcaatacctaatttattgagagtttttagcatgaagcgttgttggattttgtcaaaggccttttctgcatctattgagataatcatgtggtttttgcctttggttctgtttatatgctggattacatttattgatttgtgtatgttgaaccagccttgcatcccagggatgaagcccacttgatcatggtggataagctttttgatgtgctgctggattcggtttgccagtattttattgagtatttttacatcaatgttcatcaaggatattggtctaaaattctcttttttggttgtgtctctgccaggctttggtatcaggatgatgctggcctcatcaaatgagttagggagtattccctctttttctattgattggaataatttcagaaggaatggtaccagctcctctttgtacctctggtagaatttggctgtgaatccatctggtcctggactctttttggttggtaagctattgattattgcctcaatttcagatcctgttatttgtctattcagagattcaacttcttcctggtttagtcttgggagggtgtatgtgtcgaggaatttatccatttcttctagattttctagtttatttgcaaagaggtgtttatagtattctctgatggtagtttgtatttctgtgggatcggtggtgatatcccctttatcattttttactgcgtctgtttgattcttctctcttttcttctttgttagtcttgctagcggtctatcaattttgttgatcttttcaaaaaaccagctcctggattcattaattttttgaagggttttttgtgtttctgtttccttcagttctgctctgatcttagttatttcttgccttctgctagcttttgaatgtgtttgctcttgcttctctagttcttttagttgtgatgttagggtgtcaattttggatctttcctgctttctcttgtgggcatttagtgctataaatttccctctacacactgctttgaatgtgtcccagagattctggtatgttgtgtctttgttcttgctggtttcaaagaacatctttatttctgccttcatttcattatttacccagtagtcattcaggagcaggttgttcagtttccatgtagttgagcggttttgagtgagtttcttaatcctgagttctagtttgattgcactgtggtctgagagacagtttgttataatttctgttcttttacatttgctgaggagtgctttactgccaactatgtggtcaattttggaataggtgtggtgtggtgctgaaaagaatgtatattctgttgatttggggtggagagttctgtagatgtctgttaggtctgcttggtgcagagctgaggtcaattcctcggtatccttgttgactttctgtctcactgatctgtctaatgttgacagtggggtgttaaagtctcccattattattgtgtgggagtctaagtctctttgtaggtcactaaggacttgctttatgaatctgggtgctcctgtattgggtgcatatatatttaggatagttagctcttcttgttgaattgatccctttaccattatgtaatggccttctttgtctcttttgatctttgttggttgaaagtctgtttcatcagagactaggattgcaacccctgcctttttttgttttccatttgcttggtagatcttcctccatccctttattttgagcctatgtgtgtctctgcacgtgagatgggtttcctgaatacagcacactgatgggtcttgactctttatccaatttgccagtctgtgtcttttaattggagcatttagcccatttacatttaatttaatattgttatgtgtgaatttgatcctgtcattatgatgttagctggttattttgctggttagttgatgcagtttcttcctagcttggatggtctttacaatttggcatgtttttgcagtggctggtactggttgttcctttccatgtttggtgcttccttcaggagctcttgtagggcaggcctggtggtgacaaaatctctcagcatttgcttgtctgtaaaggactttatttctccttcacttatgaagcttagtttggctggatatgaaattctgcattgaaaattctttcctttcagaatgttgaatattggcccccactctcttctggcttgtagagtttctgccaagagatcagctcttagtctgataggcttccctttgtgggtaacccgacctttctctctggctgcccttaacatttttcccttcatttcaactttggtgaatctgacaattatgtgtcttggaattgcttttctcaaggagtatctttgtggcgttctctgtattttctgaatttcagtgttggcctgccttgctagaatgggggacttctcctggataatatcctgcagagtgttttccaacttggttccattctccctgtcactttcaggtacaccaatcagacgtagatttggtcttttcacatagtcccatatttcttggaggctttgtttgttgctttttattcttttttctgtaaacttctcttctcacttcatttcattcatttcatcttccatcactgatacccttttttccagttggtcacatcggctactgaggcttctgcattcatcacgtagctcttttgccttggttttcagctccatcaggtccttttaggacttctttgcattggttattctagttatccattcgtctatttttttttcaaagcttttaacttctttgccattggtttgaatttcctcctgtagctcagagtagtttgatcgtctgaagccttcttctctcaactcatcaaagtcattctccatccagctttgttccattgctggtgaggagctgcgttcctttgcaggaggagaggcactctcatttttagagtttccagtttttctgctctgtttttttcccatctttgtgtttttatctacctttggtctttgatgatggtgacgtacagatgggtttttggtgtggatgtcctttctgtttgttagttttccttctaacagacaggaccctcagctgcaggtctgttggagtttgctagaggtccactccagacgctgtttgcctgggtatcagcagcggtggctacagagcagtggatattggtgaaccgcaaatgctgctgcctgattgttcctctggaagttttgtgtcagaggagtacctggctgtgtgaggtgtcagtctgcccctactggggggtgcctcccagttgggctactcgggggtcagggacccacttgaggaggcagtctgcccgttctcagatctgaagctgtgtgctgggagaaccactcctctcttcaaagctgtcagagagggacatttaagtctgcagaggtaactgctgtctttttgtttgtctgtgccctgcccccagaagtggagcctacagaggcaggcaggcctccttgagctgtggtgggctccacccagttcgagcttcccggccgctttgtttacctaatcaaacaactaactcggcaatggtgggcacccctccccaagcctcgctgccgccttgcagtttgatctcagactgctgtgccagcaatgagcgagagtccatgggcataggaccctctgagccatgtgtgggatataatctcctggtgtgccgttttttaagcccgttggaaaagcgcagtattagggtgggagtgacccgattttccgggtgccgtctgtcaccctttctttgactaggaaagggaattccctgaccccttgcacttcccgggtgaggtgatgccttgccctgcttcggctcacgcatgttgcgctgcacccactgtcctgtacctactgtctggcactccccagtgagatgaacccggtacctcagttggaaatgcagaaatcacccgtattctgtgtcgctcacgctgggagctgtagactggagctgttcctattcggccatcttggctcctccccttatttatttttttcttacataacaagaatgccagtggttggccctgcaggcttggtgtcatggcccccaaggtaccactggagactctggttctttgtgtctttgtgtcccaccaaccttagtgtgtggctttcatccttatggtcacaggatgactcctaaaactctgtacagtgaatcagtattggagacaggaagaagaaaggaggtaaaaaagacatgccagctaactttgctcccattaggaagctcttctagaagctcacagaattacatttgtttatgtatttcattattcagagctgcgttagctttgtctacaagggagattggcaaatgtagttttcattagcccagcacattgtcacccccaacaaaactagggttgagttagaatgaaggggctagtgcatattgataggccactagtagtttctacacagcctccaacaattgctgtggatgtagattagtaacagaacttccactatggcatcatagcacctctatcccactagtacctgtagtaggtccaaatcatctaattccaggagcctggcttaaagaagaggaatattgaggcttctaggtccagtattaatcaaggtaagctagctgtgagaacaaacaatctcaaaatctcagtgaacgaaaccaacaaaaacttgtttcatgtttatatcacagtctgatgcagatcgagtggttctcctccaagcagtgactcagggacccaggctgcttccatcttacagctctaccatcttgtgactttcagattatgttggcatcattcagccagtgactaggaagaagagagaatgaaagattgtgcacccaattcttaaatacctccactcaacactgggacacatagcttctactcacacttccctggggaggactgcttacaagattcatcaatctgcaaggagggctgggggaatatattatagttcttgcctggcggcacttccagcaggaacacttcactatgaaaagggagcacaagtctttggggggacagctagccttctgtgccacaaaagcccagtcacaaagaaaaagccattaccaaaatgttccataaacaatgtagacctactgtggtttgctgttgtctgatagataaaaactgtgttgttttagtcacaaggatttggatgtgggagctgcaaggaaagcaaaagccaaacaagtacagctgaagcacctgagatcctaggaggagacaagaagaatacaaggtgccattgtcctatcagccaggcagaaagatggtaggaaacaaggccatttaaaatctaattgcaattgcaagggctgggtgctgtggcttacgcctgtaatcccagcactttgggaggctgaggcaggtggatcacttcagctcaggagttcaagaccagcctgggcaaagtggtgaaacctagtctctacaaaaaatacaaaaattagccaggcatggtggcatgcgcctgtagtcccagttactcaggaggccaagatggaaggatcaattgagcctgggaggttgaggcttcagtgagctgtgattgtaccactgcactccagtctgggtgacagagcaagaccctgtctcagaaaaaataataataaaataaaatctaattgcaggcaaggccacaggaagtggcaagtgcaactaaagacttcctagaaatcccacacattgataagcagccgggttgttcagccagtttttttttctgagaacaaccaattttaaaatattttaggaaaaaccacaatattgagatatttttaaacagcttatatttaaacagcatatatttaaacaaagtgattaatttagaattcatattttatttgagaaaaaaacaagatgttcctggtctggcagatgacattctaaattattcactcccacttgtggaatagctgagttatagtccggcccctcctctgtagaggaggatttataggagaagatgagtcacgttactttttgtgactatttttctttgcatttgttgactcctcttgttttattcaccttctaatcattgaataatctgtacaatcagactgccttattcatgttggcagttgttttaataataacaatgcacagagccattgctactaacagaaagcagggcagacctttgagtctgagtttggggatacaagtttgattccatcccagctccactgattcccagcgagatgtggttcaacatcataggaccaaatgaaataaaaagcgtgaaaatgctacacaaatcaaagagtgctaaagacatattaatgaaacatctgtaaaatgggaataagtaccacgtttctgaggtagcatgtaatacaactggcacagggttccacacttggtagatactcaaaaaagaaaataaaaagttaacatggacaaagtaaaataaactggaaataggagatggagaaatgttaaaacaacaggcaccataataatgtaaagtaggatttcagctcatttacaagcacagaggttatatggtaagtcctcacttaatgttgtcagtaagttcttggaaacagtgtctttatgtaaaacaacataaaggaaaaccaattttgccataggctaatggatataaacaagagttaagttccagtacatatgtgatggcatatttccagttacaaaatatcaccaaacttctaaataaagaccaaaagactcctaatattaaacattgaaataaatgtgagctatactttcatataagaaaaattaatgcaaacaagtacaataattatttactgagttattccagttcggggtcgtggatggccagagtctatcccagccgtccagggccaagtttggaacccaccctggccaggacgccatcctatcacagcttgcactcacacacactctcactgggaccatttagacacaccgattcacctactctgtgcatgtttgggatgtcaaggaaaccggagtaccctgagaaagcccacatgggggaacatgcacactccacacagacggtggctccagccaggaattgatttattttctcatcaatgttataactaaatgactttgaatgaaacaatgttatttgataacctgctgtatttagagttcacaaaatttatccctctgaaacacatacacacacgcatggccgcacacacacgtgcatgcacacactgcacacacttaatgctaaacttgaaagagatttaaaggctaaaaggaaagttggactttaaatttcccctggagctcacattttctgggtactgaaagatatggtagatacatatgattgccttttccaaaaataacttctatggaaaatcctgagagttataagagactacaaaggtgatttgatagagccacttaagtaatgtatgcaatatgatcaccaggtatacttgtatgagagatgggaaagaaaggaaatattgaaagagcagaaccatgaaggagaagaagcaattgatcctgaagaatagcaactgtagtcagggattagagacctgcaaacaagtttcctattcttttcaaaaatgaagaatagcttcttattacaaaagctgtatatataaattatagaaaagtcagaagtgcaggtaagcaaatactttaaaaatcaaaattatctctaattctttgacttattaatcattttaacagcttgattgatattttttcagatacacacatacatacatacttctacaaaactggaagtatgcttatatattgtatcataacctgcttttttatttaaaaaatatcatgaacaacttttcatgtcattaaatattgttgcattacatttctaatgaatgcataacattccattgtaaggatacagcgtaatttaactcagtctgtattgagctacattgatttccagttattcacattagaaacagtacaccactgaataaatttatgcattcatctttgcttacctctttaatgattcttcacgataaatgctagaaatagaaccacagacttaaaggtctccattgatatgtgtggctcccttgttttcctttgcaaggttttgtgtggcatctgcctttaaaaggttaaagatatttttacttataacatccctgaactttacctcaagtcttggggaaagttattgaaaagtagtttgtattcaaataagtacaaactggcaaggtcaatcttttatacaggttatcagaaacaaatcaacctcataagatggaactaaacccattattatgattgagtcagcaaacttaaagatgtgtttggtttggacaaatactattaattccttaagttccctgtggccacagtttttttttttaatgaatgtttttctgagtaatcttggtcctatttgaggccatcttcatatgcactaccaatatttccagctatacccaacaggtaaactagccctctgtaggcaattaaatgtatattttcctgaagaaagtaaggttatatagaatataagtataaggtcacctagaagagctattaatgtattatggacaatttctttttattgccagagctacatgttacttatatttaagtctgatatttaattctctattatattcccttattattgaattaattaattcatccattcatatgacagatatttcttgagcacttacttgtgccaggcactgtgttagactctggggatttggaaagaccctgcttccctcatgaaacttacattccaatgatggaaacagatcatctgtaagtgcgtaaactaatatatcatgtcagataatgtctcatttccttatctcttaaataaaaaaatattctattccatagggctgttatgagaactgagtgagactatgtggaaattaccatacacatgtttaaaaaatattgtttctttttcctcttatcttttagaaaagggaaaatgattattgtttctttttcctcttatcttttagaaaagggaaaatgatttgtataaatcattaaatactcccttgatattacaaaactagcaaattgttttttgattttattttttaaattgtcacataataattgtacatattcatggtggtacatagtgatgttttggtacatataattatagtgatcagatcaggacaattagcatatccatcatctcaaactctaatcatttctttgtattgggcatgttcaatatcctccctttaagtatttgaaacgacacaatacattattgttaactacctcatcccacagtagtatagagcactagaacgtattcctcctatgtagctgtaatttcgtatcccttaacaaatctctcccatctttcccttccccctacccttcctggcctccagtaaactctgttctactttttacttctatgagatcgaagttttttagcttctgcatgtgagtgagaatgtgaagtgtttaactttctgttcctggcttatttcacttggtgtaatgtcctccatttccatccatattgctgcaaataacaggatttcattttttaatggataccattccagtgtgtatctatcccacattttctttatccattcatttattgtcagacacgtaagttgattccatatcttggctattgtgaaaatgctgcaggaaacatgggggcgcagatgtctcttcaatataataatcttttcctttggataaattcccaggagtgggattgctagatcatatggtagttctaattagcaaattctatattccatattaaaggaaggaataggtaaatttttttcaaattttttattttgttaaagatggagtaatcctcccacttcagcctcctgagtagctaggattacagaggtgagccacagcacctggcatgggataggtaaacattttttaaaatgtttgttttgtttcaggcaaaattaggtatcaactgtttctccacaaagaagagcagcttaagccttcacagcacatagttctgataattcaggtcttcttttgccatttctcaaacatagctatcttgtgttggtacatgcgatctgcagggccttagacgaatcatacatttcatctctctgggcctcagtttcctgaagatgaagttatgttatatggttcgtaaagttcatttcagggctaacttcactttgtccttgtaaaaattatctgcctagtgggtccactccccacctcaccaccccccaaaaaatgactgctgtgctccaacccaagccaatcaaaaatgataaacacttgactgtgacttttttcaagactctgttttacagagaagtggaaaggtctactgtggaatgcttatattttaatttgtcctcattgataggagaggacaaatgtaaactaggagaaatggaaaaaccagtgatacatgtcttgttatgttaaaggaaaaagctagagacaatatgattattaataattattttttaaaattaattcttgcatttattgagcacctgctgtatccctcatatgcattaccttgtataagtcttgtaatagcccaaaaagttaagagtgttcttattctcccaaggatgcagatatggaaactgaaactgagtacggttatgcagtatgtgaggggcaatgctgccacagaaactcaagtctagctgagaccaaacccatgtttttaaccacttgcttcttgcctttgccaatcattgccaccaacgagtcaaaacttacttgttgctggaacatggtttcatcctggccttccacggaatctgttgagcttgttttttttttttttccatatgccataatatgtttagtttcacctcagatgagacagaggatttactttcaagaaagttggacgctgtccactctaaacagtaccagaggtagccttacagcatcagaaaatcctgtggtagtatctcttcatcggaacttggaatatgattttaagagttttttctatcttttcattagagcaggccaacactgacttgatttttctctgaaattagctgtggacaaagattccttttcaaactaaagattctaagcttattttcccccatcactttatcaaaactagaaacaatccattaaaaacactgcccagccttcaggggcttaatcaactcagtggtataaagcatgaaacttgattctgagatccaggagagaatatttggattgccgggaggtgacctttatatgtttctttacgtgtataacaaatacatttcaattcgcgtctagccccttaaaaccagtgcatgtttctgaccctgagtgctactgacattgtgaatcgcactgcaaacagaacacgggtcactgttgttttcctgatctgggaagacatcatggtgtggtgaaagggacagtgcgctgctgatcagacttgggttctgtctctcctctgctaccagtgaaatgaatttcagatgcaaagtggaaagatcaattgtttcttggcctctttgctgagatcaagggaagaagaaagatcagattagttccgtgacagtccaatatttactgactgacccatgttctgtttcatctcaggatttccagggggctccaatttggaccactgcagcggtcccaactgccaacctatgttttcccttcttccctacctttcccctgcagcctcaagtggttccagataaagtgttattccatgtatctcactgtctgaatctagaggactctgatacccaaatgtgtttctcagagtgtgtcaatgaaagggactctttgacccacaatccccctttttcttcacaactccatcatcggcatcctcaaagacaatccatggtgcctactactcctcatcttattgacatgattttaatgtcagctctcgccgggcgcggtggctcatgcctgtaatcccagcactttgggaggccgaggcgggcagatcacgaggtcaggagatcgagaccatcctggctaacatggtgaaaccccgtctctactaaaaatacaaaaaaaaatttagccgggcgtggcggcgaccgcttgtagtcccagctactctggaggctgaggcaggagaatggcgtgaacccgggaggtggagcttgcagtgagcagagatcgcgccactgcactccagcctgggtgacagagccagactccgtctgaaaaaaaaaaaaaaaaaaaaaattttagctctcaaagttttcctccatgttccatgaaaatacactttacaatctagtattccccccaccacacacacacacacacgcacacacatatatactgaaacgaaaccatatccaacttcatttccatttccaattcattcaacattttctattctgttctattgcatttaaaaaacgctggtcacaagccactaaactgatctcagatcagactttaataaatcagactcccccttttatacgcacagagcactctctactgtttcttcctagtacttgtcacaatttgtaagtcctaaatcatgtgattgcctacttaatgtctcccgcaacctgcccctggtgttctgtaaacttcaagaggatatgttttgctcacctttgaatttttagatcccatacaacacctatcatatcataaatgtttaataaatatttattaaaagaattaataaatgaatgtggccaaacctattcaggtctgcatggttcctccctagagttccatcacacttcacagatctaaagtttcctcccagttgtggaggtttgaagctcaaaactgctggaggtgcttcccaccatagctcgtgaaggccctattggtgttttcttcctagtccgtctctagttgatcatgacagatgggccagtgtgttttgaagaagactggctgatgcctcaccaaattctggggacaggtgcctttctccaggggaattcatgaagagactctccaggggcagggcagaccactgggaaaaacaagacccttgggttttctgaccactggccacttgtttttcccacatcaggagagtttatcatctgtgctcatccacctcctgaggttgctttgctggtgctgatttcaggtcccaggcccctaaggtctcacactcactccacaagccacctacacagctgtagttgttttcagccgacagctaggttattttgccttccaagatattttcttttatttatttattcatttatttattttttgagatgaagtctcacactgtcacccaggctggagtgcagtggcacaatctcagctcactgcaacctccacctcctgagttcaagtgattctcctacctcagcctccccaatagctaggattacaggcaagcaccaccatgcctggctgatttttttgtatttttttgtacagatggtgtttcaccatgttggccaggctggtctcgaactcctgacctcaggtgatctgccctcctcagcctcccaaagtgctgggattacatgcatgagccaccatgcccggccaatagtttcttttttgataggcagctcttaaagccctcagaatacatctctaatgatgaaatcatcaggcaacttgacaaagagtgaagaaattgaagggttctctcaatagcatcccaaggaggctgacccacaccctactgcctaccataggctggcttcatgtgctctagtgctgtgaataaaggaaaaaactaacatgttgaagcatttatttagtgccaggaggcaggtactttctcagataccctttttcttctcacataattccaggtcattggcagaatagagatgcaaaccaagaacttgggcagcaccaagatgtagatgctaaaactttaaacttgctggacaaaatgataggggactttgaaataattattcagacaatttaggcaagcaaacaaaagcaattaaaaattgggcatctggctgggcatggtggctcacacctgtaaccccagcactttgggaggccaaggagggtggattgcctgagctcaggagttctagaccaacctgggcaacatggtgaaacctagtctctactaaaaatacaaaaaattggccaggcatagtggcgtacctgtagttccagctacttgggaggctaaggtgggaggattgcttgagcctgggagatggagcttgcagtgacctgagactgtgccactgcactccatcctaggtgacagagtgacacccatctcagaaaaaaaaaatgggcatctggccaggtgtggttgctcatgcctataatcccaacactggaaggccaagtctggacaattctttgaagccaggagtttgagaccagcctgggcaacatagcgtgaccccatctctacaaaaaaattaaaattaaaattaaaaacagccagacatggttgtgagcacctgtagtcccacctactagagaggctaaggcaggaggatcatcaaaactgcagtgagctaagatcgcaccactgcactccagtctgggtgacagagtgagaccctgtctcaggaaaaaaggaggcatccaaaaaaatgttcccttagatccattttttgtctgacagagacaggagaggtgatgaaagggaatgtaagagtatttaagggattatttctttatggtagcagaaggacaaagacatgtttgaaaaatttttaatattgtataaaatgatgatattttcttagtggtcttgttgttgaatccagagattgtggtcatgtagttcataggtaatttatcagttattatttattttttaaagcttttatttatttatttatttattttagagatgaagtcttgcaatgttgcccaggctggcctagaattcccgggctcaactgatcctcctttctcagcctccctagtagctgggactataggcacacaccactgtgcctgtctaatttgtcaacttttaaatgagatcatctgcaagttcaaggaagttagataaagggtgataccacagaaaaaaaatgagatttttctctttaagatgaatattgaatttagaattccttaattaatattgaggatcacatgcgagctacagatagggaatattgagtatttaaagcattctgaatgacctgagtgttttccttctcatgcttattaaaaacatttaccacttacagctgaattggaatatagttctacataaattgttatttacacctgatacacagaaagaaatgtgtttccttatttatcatactattaatttgaatgtgctattctttttttaattgctttaaagtcaattggggaatcagattatgaatatctattttactgcttccacatttcctaagttaatcaaatacgacaagttagtgagcttgtggaatttacttgaatttcctaatcttttaactgagagggtattttcgacagcaaatattttgtagcatccatttgtcattttttaaatattcaaactagttttttttaaaataatgccaagtacacttagtgcctagtaaatgctggccactgttattgctgttatcattattcttttttgtttgtttgtttgagagggagtctcgctctgtcgcccaggctgaagtgcagtgacgtgatctcggctcactgcaagctccgcctcccgggttcacgcccttctccggcctcagcctcccgagtagctgggaatacaggcacccaccaccacgcccggctaattttttgtatttttttttagtagagacggggtttcatcgtgttagccaggatggtctcaatctcctgacctcgtgatccaccctcctcggcctcccaaagtgctgggattatggcagagaaatgtttgtttcaaaagtgtgttagtctctaaggaaatgaatacttccagactaaattctgtttatagtattatcattaataaataaactaaaacattacttctgtttcattgccccaatgtatattgtattaaaatgttcttttctgatcttctctaagttaaaaaaaaaaaaaagaaacaaagttgagtaaacaagctgagcaaactttgtgttgaaactttaatatgtccgaggaaaagaatcttgcattaagtccaatacagagagtctgataatttggtggagcagagagcctcatctgaggtggctttccgtgaacagcatctctgaggtgtcacctgctaccacattcactgtccaccctgggctttgcccctcaagcaccagggctcaggtctcttgttttgcctgtttctccctatagtctccctggcctgtgccttttagacaaaacagattaacatcacctttaagccgtcaatactgaacattctgtctttataaggcctgactcattaccaattttatttggtcaattttaccttccttgctttcaaaggaacaccatttgcctatgtcaagtgttctctttcttttatttttcccttccttctgtctttcccctccttccttccttccttcctccctccctcctctctcctctctttcttccttccttgcctccttccatccttccctccctctctctctttctttctttctttctctctctctctctttctttctttctctctctctgtctttctttctctctttctttctttccatcttcttttctttctatctttcttacttttgatgtagctgtcacgacctaatgaaaatactggcatgagtgatgccacctttagattctccaccttcctgttcctgtcctattcaccaacatgaattggtttgtggctgtaagtacttggtgggttattgctcatagattcagttgcatttttgctgagatagtgctgttaccaaaagcaggggtgctgcttgaagaagtaaacctaactctgaaaaatagagactctccagaaacatcataatcttaaggatggacatttgtggcctgttattgttacttcattctaggtgacagagtgaagtgagtgagggcaaaaatgactgcacacttatggaaagagggctgcctccaccacagacaggtagtgggaggtcccactcttccaggttgaacccaatatcctatcttctccttccgctcttggtacctgttgttgctattgtaaacacttccctcacctgggactgcatatagatgaaagattgctggggggtttcccaggatcttgggccagtgccaacaaatggcaaactttcaagtctagagatggtcctatggcatgactgggggacaccacttccttcaccagaacattcacatccttcccaaggtgccacgcccagttcttttgtccaacaataaactctgcgaagtggagtgaagtcaccacccaagccttagcctacctctgaccacagcctgtgactccacaaagataaatgaaaagaggaaagtcagtgatgttttctatactgtcagcagcaatctcacagcctcaatacattttctttcaaaagtttaatatgtaataactggcatttcttcttcattcctagttggttagactgcatcacatctgccatgccaaactattaagagtaatacaattcttactcttagtttattaagagtaaaaactattactcttaatagtttagcatgctattactcttttcttattttttaatttttttaattttttattttttgagacggagtctcgccctgttgcccaggctggagtggtgcagtggcacaatcttggctcactgcaacctctgcctcccaggttcaagcgattctcctgcctcagcctgccaagtaactgggattacaggtgcccaccaccatgcctggctaatttttttttttttttgtatttttagtgggcaaggggtttcaccatgttggtcaggttggtctcgaactcctgacctcaagcgacgcccccgcctcggcatcccaaagtgctgggattacaggcgtgaactgctgcacctggctgacgtgctattactcttacagcatctggacaatccctaacagtctgaaagctctataatgttgcaggtagtccaaaggccctatcccttattctagaacacaggctttatagcacaggctttggcaagtctgtaacagtctgaactcctccactgtattccacatactagggatcttttaagttgtcattatgtcctggcacaagcatttatcatatttctgggagcatgtagggttcaagatgcgagggcaagagagggctgagttgtttgttattaagctgacaggaaatggccaaggctcatgtgctactgcttgcagttgggcaaaagaggataaattaattgctttgtagaaattcctttctgcattctttagggaaaatttttccatgtgagctaaatgagtcaaagggggtggttttgggctcaacagctttgacattgtcccttcaaggaatgaaacaattaaagaaactgatctcctctgagaaaaagaccatttacaataacctatctactctacataaaatattcccagtagactcatcaaaacaagaccctctgataccacaccatactgggtttttccttattgggattcccccatgttttttctttaatgcttccccatgttttagaaacagatttgcttacccggaaccttccacactcaattccaaatttatcatagtactatcatttgggagtaaacaacatgtaaggggcctacacgggtggaaagcccattcaagaaactgaggatgatcaaatagtagagttgatagtatgtgtataatcccagggaggagtttcatgacggattagaaggtcaacactgcctgatgcagccgaaagatcacattaaaacaggacaggaaggaagtcctggctgtccagcaaaaggtctttagtggctatatcaagagaagcttttacagaagggtgagggtggtagcctgcgaacattggattaggagtgagagggactgaaggaagtagaaactcgagctcaggggaaggggagagaatgagcttgaggaaggccctctgatgaagggaaggctcttttctgatgccagtgagttgagcagacttataggaagcaaagaggagtctagggacagacagggattgtccaggtaatgtaggaaacatttgacaaggacagatctcgaataaaaacatgaatgcaatttctgtttcagatgtctcctttgcctgccccatcccacattctagaaaaatatttggtgcattaacagattttggacttcacagggcttcacttttattgtgcttaatatttgttccttggtgaaacacaaagagacaaactacacaaaaagagaatcatacttgatgaaaaaaatcaatgtttagaagttgctcttaaatcttttacccattgctaacatgggtatttggatgccatttggaacgtattccaggactacttatccatgaaaggattaatgatattggagccaggttcaaagtctcagcaacaagctaaaacctgctctttttagtagtcaggggcaaagcttagtatcctttcttctgaaagctttcgcatgctaagctttccattgccaagcccccgggaaggaaaataccagaagtttcactccgatagcagctttttctgagatgcgcctggtgataacattttccagtagggctatcttctgtctccttccttctctgtgtgtaccagtaaagccttgtacaagtctcttaacctttcttggcttcagtttccaaatttgtaaagtgaagataataatacctccctcatagagttgttgtgaggactacatgggctaacgatcagacagaaagcactcattaagtgtgactagcattgttaattgcagtaatagtagttctagtagcaggcttttccaggttataaggattaaagatacgctcatgttacctaagttaatggtgcattattttaagggtacaccaaaaagtaagaagaatgggaaactacttaaccagcacatggggtgcagaagcgagagcaattgtgttttctttttttttttttttttttgagatggagtcttgctctgttgcccaggatggagtgcagtggtgagatctcggctcactgcaacctctgccacctgggttcaagtgattctcctgcctcagcctcctgagtagctggggctacaggcatatgccaccatgcccggctaatttttgtacttttaacatagacgggggtctcaccatgttggtcaggttggtctcgaactcctgacctcatgattcactggcctcggcctcccaaagtgctgggattacaagcgtgagccaccgtgcccagccccaagggaattcttacagcctgacaggtttggaactctgagtctctctgtgtgtctgtgtctctgtcactccaccatatgtttagcagggttaattaatttgcccaagatcacacaattagtagatgattatgcaagatttgaaccagttgttattcattggaatatgattactgtgtaagttagcatgagaatattgaaaataaatgtcttgttagattcatttattttttaaaaaattcctatgtaggtcgggcacagtggctcacccctgtaatcccagcactttgggaggccgaggcgggcagatcacctgaggtcaggagttcaagagcagcctggccaacatggtgaaaccccatctctactaaaaatacaaaaaattagccgggcctggtgatgcatgcctgtagccccagctacttggtaggctgaggcaggagaattgcttgaacccgggaggtcgcagtgagccgagatcacaccactgcactccagcctgggcaacagagcaagactccatctcaaaaaaaaaaaaagtcctatgtatacttcttcacatcaatttaggcaggctttatttgttaacttttgttggtagccaacatgcatttaaactacttattattgtcctaatctaagaaaaactgagaaatggatgaagttggtcctagggtatcccaaagcacagagtgttttattctgtccttgggacagaggtttgattcaaaatgttttttcggaaactagccttgaacacctaattttattaatattctttttacactccatccctcctggaaaaggactggaccccaattcccaccattgcttttttgggacccattatcttccttagcttcctatgcatctacagggtagtctgggcttcacttcctcagtgtccctgtatgaaattaggtggatatagattagtctgatgtaggaatatcacactgtactaaggtttagtttgtatgttattctctcaagtaactgatctttcaatcgaactaaacacttcctatgtgctttaaggtggtgggaattacaagcatagcaagttatgattggtcacggatttctttcctctttaaatggtgacctactgcccattgtacctactcaaagcaactttctttaggaaaaaagaccacagtctactttcctaagcataaactcagttctcattccacctctaccacctgcaagatttgttaggcttaagcagtcccttaacttctttgagtgtttgttgccttgcctacttcattggaagtaaggctctggaacagggaaggtttgcctccataagactaaaagttatgctaatataagagactagcaaaatgggagacatattcagctctcttcttgtggggaataccttgcccttgaccaaaagccttgtcccagaaagagccgtgtgggtgttggctttgtgcccaacatgtggctcctctgccatgattgatggcttcatttaagaaacaggttttaggattttttcccctaaaatcttattcctgttaattatcatggatcaactttaccttagctcgtttaatacacagtcacctggtataaaagcatgtgaaaacccccagggatcgtaaccacatttatgcattgagaaaagagagtgaggccaagattttgagatgtgttcaaatgcaagaagcttttaaaatgcaaagtattctaaaactgttgaaagttgaagctaactgttgttcccttgttgaaggtaaaaagtaaagcatttttaggaaagcacttttccttatgtgtctaatatttgggaactgcataggagaacagtttaataggaaccctgatattgacagtaagatatattcttaatgtagtaaccagacccagggcagaatttgcaaacccatggtaggcatacaggtggctgaagaagaatcgggacagcaagatctcactgagatgcaattccattcctccatttgatacagattaagatttctgaaaaagaccatcctcctaaaccctcatggactctgcagataatatgaggccagaaaatgaataattcccaactcttgctatctcgttactggccagtgtgtctggcttcgctgagtgtgtgccttctgaagcgtaccctataattattcagcaggtatagtccagttcgtcctacttactttagcaagattacctttcttttatttttcctgtgaaaatccttctcttccttctttcctcctttgtctttcctctttgttaactttttaaatctaaagtgccttgaaaaacttgtttacatagtagtaagaaggaaaatgttgacttgtgctatcctgggaaccttgaccttcctgcattatggataaatcatttccctgcaggtggaagtggaaaattgcagatagaaccacattgactcacattctccttctacttccatttgagtgagcaccaagtatgcatcacgacttgagattataaagttggcttaatgatgagacaggtttctcagtcgggttttccattggctcgaagttcacaaggcagttgttgcttgtctcagagtgtccttaggtggactacatctgaacccttggcgttattataatgcagattctagctgtgctcaaaccaatgaatcagaatctcaggagggtggcgctcagaaatctgcatggttgatcagttctttagcagattcttatttttgtatgctaaagtttgagggtcaccactggagagattccagaacagggcctgcaagggaattgttcaaagtttgctcaagttaactttgttgttacagcattagcttgaatatcaggaggttttgtatttaagttctctaaaaaaagaaaaagaaaaaaagagaacagtctcaatatataaaaggaaaggttttcatatatgtgcccaattataagtatcttgagtattctaggagtctaaacagaatgtctttagatcatccttataacgatcctgagactcttttgactgttttgagttgaagacaggtaataagaaagaaatcaccaattaatgcagaaggaaataaatttctgtatataataatattcacatttgccatgtctcttttaaaaagtccaaataacaggcagagcgcggtggctcatgcctgtaatcccagcactttgggaggccaaggcgggcagatcacctgaggtcaggagtttgagatcagcctggccaacatggtgaaaccccatctctactaaaaatacaaaaattagccaggcgtggtggcacttgcctgttgtcccagctactcgagaggctaaggcagtattatcacttgaacccaggaggtggaggttgcagtgagccgagatcgcgccactgcactccagcctgggggatagagcaagactccatctccaaaaaaaaaaaaaaaaaaaaaaaaacagctcaaataactttaccgtacataactttaccatacatgtcctctagtctcttatcatttcttcatatgaagaataatttatactcattgatgtaaattttgctatattttatacaacaaacatagtattattttaatattgcacatagagaaaaatacctcttcccctcaaaattagaagggttggtatttttattcaggcttattgatttaaaatacctgcttgatccgtaattcaggccatacgatttcaccaaaacaaatatcctaatagttgtcatcttgaataactgtttagtgcacagaatgtagtctcatttattaagaagtgatttaagagattattacttctgcatctatcacactaacatgaccaactctttagtaagggaagagtaagggaacttattttatatctagatagaaattttattaaggatacagtattaggattcataggggaaatagtggatagatcacaagaacgaggctctttctgagccctgcaggaaagaatatttgcagaacaataaaggacatggtggcttcctggagaatgttggccgaagactgagccttacttctggaaaaggctcagtgctagagccaagtgagcatcgatatgccaatacaggcaagaaaatcctgcaagaggcagacttggttcttaggtcggaacaggctctgcttcagaacttgatccggtacccaattcgtttctgcttcagcttctttttctataaaatgagggtagtacttatcccatgagggagctgttatgaggataaatttggctttattgaatgtgcatgattcctggaacccataaagatgtcaaatttagaagcctcagagagatttcctttgctctgtgaataactaaatttggttagctggggtggggtctgggtacttttccttgtgaagaatttttccctcattctggtcatctcctcccctcctatagaggcaccatatatttttcttgtctcaggtacctatagtgataaaacaccctgagctgaaaggatcgctggatagggcagtctcaatacaaaagaatgtggcagaagctcaggcttcagtgcacatcagaatagaagcttcatgagggcagaggcttttgtctgctttcctcattgcagtatccccagaactttgagcaagtgcacactcgatgaatacttgaaagaataaatcaatgtcagacatctgggcttatgtctcatctttctactgttctcaactaagagattctcgtcattctacaactttcctgagcctgctctccttctccaaatattcacccttccaggcactgactccacctcccacatcagagctttttcttaaagtaaataacagtcaacaattaatagcttcataactttggaacagtgcagtgtctttggtttaagaagcattgtttccatcctccaaactaaaataaattttgagaaaagatggagatggtttgggactggggaagaagggaatggaagaagtgattatttgagggcacattaactatttgtacaaagtagaatatcttagttaaatttggctacatagcaagcaggtatcattaaatggatgtctgttagaatcttgattttcaaattaactagatagtcagcgttagttagactgagggagggtgattacagtcctatgtcactgagggagaatggtgaaagggcaagagaaggctggcaggtagagctggaatttttctgccagcaatagaccagtggttcccaaatgtaagcctgcaacagaatcatctggagggcttgttttttgtttgttgttgttgtttgtttgtttttggttttgtttttttgagacagagtctcactctgtcgacaggctggagtgcagtggcgcgatctcggctcactgcaccctcagccttccaggttcaagcgattctcctgcctcagcctcctgagtagctgggattacaggcatgtgccaccagcccagctaatttttgtatttttcgtagagacggggtttcaccatgttggccaggatggtcttgatcccttgacctcatgatctgcccacctcggcctcctaaagttctgggattacaggcgtgagccaccgcgcccagccaggagggcttgtgaaaacacagatagctgggcccatccctagagtttaggattcagtaggtctggcggaggcctgatagtctgcatttctagcttggccaggggatgttgatgttgctggtcccaggaccacattttgagaaccactgcaatagagagtgtgcatgaaaatacaacaacaattacctgatggtccttagcttagttcagttgtcccccacaggttgaagcagtgttcaagggcaaacaaaaactttctctctcagccacctccataagttccatagtttatttaacaaagcaaactcacaaagaaggaggaagttaggactgctccatttccccttatagcaaaggcatgtgtatttcacaactgcaatcagcttgaatagcagaggctggaaggctctccatgtctttactgaagtcacgtcactaagtcacacagacatgctgctaattcactgccttggccagcacatctgaaaataaatagcaccattataggccctttcatgaatatacagcatgtggcctctaaattggccaaggagctggctatgctgggacaaataacttagataaatcacaaatcagagtggagaaatgaggtgtttttaatcaacagcatccaacaatgtgtgttgagtttaactgaatccaggtagaggagggagtgggtgcaagagctcaaagtatgctgagaatagttttatttcaaaattccaggagacttagaaacaacatggtaatgatgaaaggagcctgaagagactctttttttttttttttttttttttgagatggagtcttgctctgttgcccaggctggggtacagtgtcacgatctcggcatactgcaacctctgcctcccgggttcaagcaattctcctgcctcagcctcccgagtatctgggattacagacatgtgccaccatgcccggataatttttgtatttttagtagagatggggtttcaccacgttggccaggctggtctcgaactcctgacctcaggtgatctgcccgccttggcctcccaaagtgttgggattacgggcgtgagccaccatatctggccctgaagagactcttaagatactttcataatagtttaaaaagctgtatgtgtgtttacaatttctgtcataaatctatggtaaccacagcacaaacattttagaaaaagaaaaaaaaaaacaactctcggttgagtgtggtggttcatgcctataatcccagcaatttgggaggctgaggcaggaggatcacctgcatccaggaatttgagaccagcttgggcaacatagcatgacccatctcgacataaaattaaaaattaggtatggtggtacatgcctgtagtcctggctactctcaggggactgaggtaggaggatctcgtaagtcctggagtttgaggctgcagtgagctgtgatctcgccactgcactcagcctgggtgacagagcaagaccctgtctcaaaaaagaaaaaaaattctattttcccacctctctaacataactgtgaatagtagtatttccttctagtttttaagtacactatttaaaaacatggaaggttttcaaataatgtacttagatttaaatgcatttttaagcttatacccatataataagcatagtaactaacagaatgttctttggagtcagatagtcttgggttcaaatcctccagacatttccagccctgagttttgcatttgttaaatagggatgataaacctggttcatagcattgctgtgtggattcactgaggtgctcatcaagtgctcagcacagagccctgtgtcatgtaagcactcagtaaatagtggcatcattttctgttttcacacacaaaaaatgagtcgaccttctgcaatcctaataatcagtaagttcttcttaatggccagaagtatacctatttttagtctatgcatttggcaaaatttcattccacaaattgtttggtggtcccaggagctgctttcaagatcttctctgaccagcttgtcgagagcttttgttatctgtgttttcctcaaagattagactcatgaaagatgtgtgaaagccaaaacaaaggaatgaccactggtgctcagagtgagagagattggtttagttgtttagccaggctatgtggctttgttcccagaccacagattataaccacaccattgtgggcaccacatatagccattttggtaaactagatatgggttgctagggacatgggcaagaaaccatgggtggggaggtgtggacctctcagccctgccctctcaagcctggccaacttcacatctgcaactgggactttgtttctgttccagacctgtttatccaactgccaacttgacagccacttggagtcctcatgagaacctcaaacttagtatgcccaaatgaaattttcagctcaccagaaggtaaccatactgtcttgagtcttacagttaccctgtaaacaaagggattaactttactagatagcaacttcctgcccataaagttaagaaaagagcccctcaatgcaaatgttggttttgcttatcaaataaatggattcttggttcttcaggatagttacagataacaatgggcagaatagccagtaaattcagtaactccttaaaattgttgaaagtattttgtgcactttctttatatcgctgcttagagtgttaattggtaaaatactctgaaggactaatacacaaacactttcacccagcaattccaattctaggactttattccacagatatatttatacatgtatgagttcacatgtacagttttctgaatttttttgtgctggcagaaaactagaaacaacagaaatgaatgaaagagactagttaagaaattattgcccagttttatagtagaatacatatgcagctgtaaaaaaagaatgagggaattattatgtatttatctattaagtgaataaagcaaaatgaagatcaccagcaaacagataaagaaattgtggtattcatacagtggaatactcctccataataaaaaggaatgaacaatgggtgaacactacaacatagacgactctcaagtactgtattcccatttgtgtaaataaaaatgtgggaaagaatgtatacatgtatttgcttataaactctatatgcacagaaggaaacacaagaaattattaccccgggaggcagagcttgtagtgagcggagatcgtgccactgcactccagcctgggcgacagagcaagactccgtctcaaaaaaaaaaaaaaaaagaaattattacctagattgtctatgcagagggaactgggtacctggcagacaggagtaggagggagacattgtacaatatgcttttttatactttttatatttaaaattgcaaaatatcttacatgctcaaaataaaaatagaatagcttatataactatgtctaaatattacatgtagttttcttctctggctattttctttttggtttttatataattttttaaaatccacttacttagcccaggcacataaatggaaagaaagatatgcttaaaattatgttatttgcaaaaacaaatatttagatgttttagagctagtatgtttttgttggtttctagtttagttctacatggcatcagactagctactctatatgatttctggacctttgcaatttgttaagatttgttttatggtcggggatatggtcaatatgtaaatgtttaatgtgtgcaagaagaatgtgtactctgaagttaggcatagtgttttctgtatatgtcaattagcacaagtctgtttatcatgttcaagctctgtgtatctctgggtttttttaatctgcatgatagaacagaagtatgtttgaaacttttattgtagttgtggatgtaatatttttcctctacttttgcagttcttgctttatatattttgagcctatattacttggtacatacatatttagaattgttgtgtcttcctggtggattgccctttgattatttaggaaatgtctctctcttcggtaatgcttcttaaagtccattttgtctgatagtactatagctacctcagctttcttttggctaggtttcataactttttaaattctttcactgtcagtctttttatgtccttatatttaaaatgtgtcaaaagaaagaaggagaaagaaagaaagaaagaaagaaagaaagaaagaaagacaccgcgatttacctatgttacaaacatgtatatgtaaccctaaacctaaaataaaagttaaatataaataaataaagtgtctcttcatgaaaactttcttagcatcattagtcattagggaaatgcaaattaaaaacacaatgagataccaccacatacaacatgtctagtataatggctaaaatgaaaaatactaacaacaccaagtattgttgaacatatggaaaaactggaacactgattatgggagtatacaaccatgttgtaaaacactttaactggtcatttacccaagaggaatgaaagaatgtatccatataaagatttgaacacaaatgtttacagcaactttatttgtaataggtaaaaactgaaaacaactcaaatgtccatagacagatgaatggatttaaaaaaaaccatgttatatccatacaaaggaatactcctctataataaaagggagtaaactactaatacacagtgcaatatagatggattgcaaaatgattctgttgaatggaagaagccagaccaaaaaaagagatatattgtatgattctatttatgtaaaattctcgaaaatgcaaaggatctacagtgacagaaagcaaattagtagttaccaggagacggagggtaaaaattaagaaggggcatgaagaaacttttttattgtagtaatggtctcatgggtctatacgtatgtcaaagcttatctaattgtatactttaaatatgtgcagttcattgccagctaattatactcaatctgtttttaaaagtaaaatgtgcttcttataagtaacaattttttaaaatgtagtctgatgacctttgtcttttaattagagaatttaatctgtttacatttaataactgatataggcagggcacggtggctcccgcctgtaatcccagcactttgggaggccgaggcgggtggatcacctgaggtcaggagttgaagaccagcctagccaacgtggtgaaaccccgtctttactaagaatacaaaaatgagccgggcgtggtggcaggtgcctgtagtctcagctactcaggaggctgaggctggagaatcgcttaaactggggaggcagaggttgcagtgagctgggattgcaccactgcacttcaacctgggtgacagagggagattccatctcaaaaggaaaaaaaaaaaacctgatatatttgggtataaatgttcaatcctactgtaggtttttttttccattttgcccacttgtttcttgttgctatagtcattacaacaatacatgtttgacttattagaatcctagtattaattagtacttttaccatttcccagatgatataatatgggctttaaaacacatgaaatccgtttacccctcaaaccttttgtgtatcattgatgttttaattctatgtatattttaaacttcacattattatcattattatatttatattgcacagtcactatcatttagatttacttatgtttacccttttggtgtatttcaatgctttcagcacttctgtgtttccctttgggattgcttttcttctgcctcaaaaactctccttactatttattttagtatggctctgctggtgataaattctctccatttttgtttatctggtaaaatatttttccttcattacttatgaagaatattttcactaggtagaaaattctagattgttagttattttatttcagcactttgaagatgtcattgcattggtttgtggatttcactttttcaattgagaagttaattttgttggttgcattattacactttgaagataatgtgtcttttccctggatgttttaaagatttttctctttgactttcagtagttctactatgatgtgtctaggtttgatttcctctgtattgattctgatgggcatttatagaactttatgaagctgcgtctggtatttttgccagccagtatttctttaaatattacttctgctccagtttcatctctcctcctcctttgggatccagcttacacaggttacatctgttactttatgactcaacacacttttctggaaagactctcttttctttaaacacaagacactaaatggttacaggtgttcttttaggtgattatgctgcttcatcagcagatggtgattatatcaagaaggaaacttatatgatgacatataaaagctggggagaggagatgtctctgaagacagtgagaaatccttctctagtcttgctgctggaaccctcaaacacttaagtcatctaataaacattctactgtcttcagaggaattttctcagtgaaagggatttgggacacccctgtgaggaagaaacataagttccatgccttccaaataaggggcaaacttttctttgtagtcatgtttccacctgttgaatccgttttatggaagttgtacagttatggcttgtctgtttatgagaagagatagagaatatgagaaacgataaaacctgaaataatccattgtgaggccacaggctgaagaacttacaaggaatttattctagactttatggctgaaaatatgtatgcatatatgtatatgagtgtatggagatacagttatggatagagatctatagatatatgtgtagatatatagatacataaagtttgctacagaaattcattttgtacacttttaaaagtgcactttactaaaagcatccaagaatgcatctcagaaaaagccttagatttcttttatgtggtcaactccaggaactactcactcttgagatagatgtgtgttttcagagcttatccatgccatgcacaatgatctaaccctttgatagctgcatcattcaaagtcagtttttctacatgcaacaaatttttaaaccttgatttttatttatttatttattttgagacaaagtctcgctcttgtcccccaggctggagtgcaatggcgtgatctcagctcactgcaacctccacctcccaggttcaagcgattctcctgcctcaacctcccgagtagctgggattacatgcacctgccaccaagccaggctaatttttgtatttttagtagagacggggtctcaccatgttggccaggctggtcttgaactcctgaccgcaggtgatccacccgccttggcctcccaaagtgctgggattacaggcttgagccaccgtgcccggcctaaaccttgatttttaaaaaaatactaccctgccctaaccttgtaacttaggaagtttggggagaggggtgtgtaacaacctttcactgcttatttgatgtaaatcatttctagtcctgaaacaatggctattttgcaaggtttaattatactgtgtgttgtggttgcatgcataggtacacccacaaatgtctgtcattaatacgtatcactagctttgtactttacactgtatttttggagtgttttacagtcgttcgttaccaagagtaaattatatatttgcttttctttaccccacccctttcactattgtttaaaacatgtcagattcaggaaaacctcaagagacccaaacctctttcaatacttatagacaaagtttttttttccttaaatcagttttaaaatccatccagccattttggctgccggccataccagcagataatgaaagaattttccttgagggtcaaaagccagggagaagccttccagggctgtttggtttcctagcacagctgctggagtagctcgtggtgctgattgatctgcttggagattcttgtgcatcttcacctgttagagctggaaagatgctcaggactatacagcccagcccttctggtttacatataatgaaactaaggcccaccttagtcaactaatgtgcttaaactcaagcaaatggcaaatggcaaaactcaggactctgtcaatgagttttcattctttttctttattcttctagacacatattttataaagaaatgaggcagcatgatgtttaaaatacttaaagtgagaatgagaaaaactgatgtctacatatcatgaaatggttaaaaagtttaacgtgcattgtcttctccattagaacttcttttacgaatttttttctcaaaatctggctcagaaatcttgttttaaaagctccctaaacattcctaggcagaattagtaacgccttcctctttgctaacaaggaactgtgcatattcctgtaatagaatacttaccatattatattgtaagtattaaattattcatctgccctcctcccacctacccactggatcaggcttcccaggaacagcaacagagagcccagcaatttgtgtgttctcagtgtggaatgaatgaatgaatgaatgaatgaatgaaccaaccattccttcacagtcttgcactatcagtgaatcttatgctttattgaacataaaaatcacctggaattgctgacttaaaatacagttttccaggctataccacaagagatgctaatacaggactggggtaggtccaggaattcgaatttttatctaagtagctgatgacttaatgcaaatgatccagcagccacactttgcaagctctacgctatgattagttgtggtttgtagtcccaattgtatatcataattatctgctgatctgaaaaaaacatagagcttctctacccactccttaccaccagtccatcaccaccattctgactccttagtcacaatgggtattgacattttaaataaatcccaaggctcccttccgggagaataaagaggataatatttataaactattttgagttccttagaagaagggtatcttagctcattaaggaaatattatcatgatataaatctaacatcatgaaacttatcttggacatgtcaaatttggtctaagaatcaaatgtagaggaaaataaaacccacacacagtacctgcatggaaacggaacctgtgcaaacacctgctttggctatgttcctttttgtggagacagatgtcccccttcactaggaccagggtagagatgaagaaggttgatttggacattggggtgctatatgttcttttgggactgaagttccatattaggaaacttaatagctgacatttacataacttttaaacatcccaagtagtacgctctgtctgcacactattttatatgtatgcaatttgtttgtttttgtttttgttttgagacagggtctcactttgtcacccaagctggagtgcagcaggcatgaacacagttcactgtagcctcaacctcccaggctcaagcaatcctcccacctcagccccctgagtagctgggactacaggcacacaccaccatacctggctaatttttgtattttttgtagagactgggtttcaccatgttgcccaggctggtctcaaactcccgagctcaagtgatccacctgctttggcctcccaaagtgctgggattacaggcatgagccactgtgcccagccatatggatttttttaaaattatgaacttacataacttcacaggagacagacctgaatgaggtagttattaaactactttctgactatggaaaggatttctgatccttgtagtatatttccacgtatattgttatactgttgtgtgtttgtatttagttgctcatactattttttactgtagcttactttatatgcaggtttccatgggtcaacctaatttatatttttgtcattttaaatggaaaaatgatatcccatatattttgtagtattatttgttcagtgttctttccaatgtgggatgctttggttatttctaattatttgctatcatgctatcatatacagaattcttatgttcatttctgctcaaaattatatttttgtttgtatgaattccacggtgtatatttcccaaagcgagatagttagataaaagagtaacagcagtttcatagttctggttgcatattacagtattactttccagacacacagagccaatatacaaccccaccaggggtgtgaggcatgctggttttcccacagcttgaccaacatgaaattttatcattccagcctatttctgctagcttaatatgtgtgtagggcctcactagagatattttattttgaagttcttcaaatgatatgaagcaattcttttccacgtggaatgattcactattttcattttaaggacaaaccattcgtttgtatttgacagttttgaagtgacaggtttaattgccttctgtataattgattctgtagggagagaaaataggagtgctattaggtattgggttaggctcaaagagtcaagaaagaagattagttgtgtagttctgaatttggaaacttgtatgtggacgactggaacagaaataccagttgaccctgtttaagaagggctagagagcaggaacattctgatttcatgatgacaaaaatactagagttttgacataggacaacagatcttgcttcaaaatgaaagcaagaccctatccttcctgcctctttgatcctctcacagtgccactttctttcctgaacattttcagatattcttatttcagatagaccactctggtgtataataggaccagttttagagtggccatgaagctaagacatgttatttgagagctcttaggggaagacctggacacagcagtcgcaggagaagtcagtcttatctgtaaaaaggtcagcttgatcacagaaaaaggctttggcttggttgtgttggccctccatggcttatgatcctctttcaagtaagcaaataaatgattgcagtgttggtttgagtcctgtggtgccaaacacaagacacattgttgctcatgcaatatagacctttgttttggacagtggtctaatctgctggtttttaaaacattggtgactgtccaacttataattaaaatcagtctatcaagcacttggagacaaaatctgaggttattctttcattcctagttgtcacactaattttttgccttcacttttgtctctgtagaatatttacacgtacacctatctatatctatttagatataatttatatactacaaaattcacccatgtgtacagttcagtgatttttaatgtattcacagtcatcactacaatcaatttcagaacattttcattactccaaacagaaaccccaaactcattagcagccactctccatttctctacaatatccccaaccttaggtgaccacaaatctactttctgtctgtatagattttgcaattctgggcatttcatataaagaatcatagaacatgtggtcttttggtttagcttatttcacttaggataatgtttccaaggttcatttatgttgtggtgtatataggtactcttttcctttttattgctgagtaattttccattgtgtggatatacaactttttgttaagtcattcatcagttgatggacgtttggattttttccattttttggcctttatgaataaggctgctacgaacattcatgtgtaagtttttgtggggaagtgtggttgtctttttttttttttttttttttgcaacagagtcttgctccgtcacccaggctggagtgcagtggagcaatctcagctcactgtgacctccgcctctcgggttcaagcaattgtcatgcctcagcctcccaagtagctgggattacaggcacacgccaccacacctggctaatttttttgtatttttagtagagatggggtttcaccatgttggccaggctggtcatgaactcctgacctcaagtgatctgcccacttcagccccccaaaatgctgggattacaggtgtgagccaccacacactgccagaagtatgttttcatttctcctgggtaaatacctttgagtggaattgctgggatacatgggagctctgcttaaatttttcaggaactgccagatggctttccaaaatggctgcaccattttatactcctaccaacagcatatgcgtgctccagtttctccacatccttgcaaacacttgttattgcccctctttcttgttatagccagcctagtggttgtgaaatggcaactcattgtgatttgatctgcatttcccatttccctcacggctagtagaatacttacttcctatcctagtttttccttatacttttaaaaaattaaataaagaaaacgctgtagaaaattaaggagcaaaatgtatgcttgcagctacagcttcctctggggtttcacacttccttgcctcatcatgtaacgggccaccactaggatgaaggtgctccagtcttattcttccaatcttctctccatttgtcattcagaatcctgggaaagagagacacttgtcctgccgtgagttatgtgcccactcttttgatttgtgtttctgcctagacagtgcacagcatgagtgttggcatcttgaaaggaaactggggtgctcctgagggagaatagatgccaaagttgggacaagagcccagtttcctgcctttctaggtgtaactcattgccaaggtcgggagcaaagcaaaccatgtaggaaacctcatcatgctgggtagttaataagtatgccctagcacacgttttcacagagaaaacataatacgcttcatttgtaatatttaagtattacatctaaagttacaatgtttaaaaatttatatatacccttgttggatacaaagcatgtttaaaatatgtgacctcatttgatcctcagtaatctctgttagtttctaattatattcagtagtggtattggtattgtatgttttggcctcattgtggtttaaatacacttttgtgaactagcctgagaatccaaccaccaacacaatgatgtaatgagaaaacgtgctctgagttccaaacaaatggctaacagataagtgctcagaagtcaacctttttgtaagctggggtatcactggccagcagtcacatgccagcaggtgtgagtagacagtggggaacaatttcctctcatgtgtatggctccctaaagtgttggctgagcattgtccacatgggtgatgcaaaggatcactgaactaggagcagttgggaaaaaatacaatcattgggaattcctgtagcatcgaaggtgcctacagggaggtagaagtattcatacaacagttctctggtgttctctgttgtagcaaccagtcagccaaaagggttcagctgcttgaaatgagaatggctggatcaaaatggcagctcaggatttaaaggattctagtcagataccagacatcctcacatagagaaaactctgaatggctgggggagaaggagtcaaatgccctggatctttttcttgggcctcaaagtcctccttctgtcatcatccttccagtattgggcaggacctgactgcaggcatcatggcctctgtgaacttctcaagggtatgtattatctgacaaaaactacgatgtccactaacaggccactgaaaaggtatcttagtcagttctgctcattgcccagccaaggcctacgttttataacatgatatcaaagattgcatctaaaattgtgatgatttcctaaaataatcatttcatttagatttttctattttaatccaaggtattcttcagcggaaataaggaaacagtttactctcccaccaaaccttggccagtaccatcgacagagcataagtacctctggcttcccctctcttcaactagtaagtatgagttccaggtttacttagcgattggtcaagtgcaaaagtgcccagggtatgtgtttgcctcctgttccttagatcttcctaccatcacctcacattctccagtcaccagatcctaactctgtgactgtgtctggacatcagacaatatccctctctctctctgccaaccggtacttagggtacataatagaacctctgggagctgtggttttgatgtctctagactaggtgggcttccaggtgactcagtctcatccaaattatggttcatatttgggggagaagggctagcccaaaaacttaccaccatttgtagtatgcatttttttggaaaagcatattccaaaatctgaaatgccaagttacagacctcctttttgtaaaataattttcttgctagtataatttacatataataaaattcacacattttaggtgtacaatttggtgaacttgggcaacttagagtcacttaacctttcctcagtcaagatatagaacacttcttttatcctaaagcgttccccagcgcgcttttacaatctcctctccccaggccacaccctccaactcacgcaatctctgactcacttctgtcaccataattttgctctatctggagcttcatatcctgttacagtatgtacaaaccttctttttttgagacagggtgtcagtctgtcacccagcctggagtacagaggtgtgatctcagctcactgcaacctcaacctcccaggatcagatgattctcctcccacctcatcctcccaagtagccgggactacaggcgcatgccaccacacctggctaatttttgtactttttgtagagacaggggtctcgctatgttgcccaggctggtcttgaactcctgggctcaagcgatcctcctgcctcagcctcccaaagtgctgggattacagtgagccactgcacctggccctaaaccttcatttttaaaacacatttcctcttaaattgaagattgcctacatttttatatcaatgccaattgttgagtgtgcctatatgtgttatattatttgagcactaaatgccagatgtgtgccaagtgagataaatctgacaaatgagatggtttgtaaaaccagcagtgaatattcacttcctctgtgagagagctccagccctcctgtactcacttcctcacacagcacagcagcactcttgctggttctgctgcttatcttgaagaggttaggttactttttgtttctacttattacttcgaaaccacttctgccttagaaattttgtaaccttccgctcagtttccggtaaccgccattttgtctcctgtaacaatttacgcgccgtgtaactgtgaatctttcaaaggtatgttttactggagtgatttctggttatttcagaaggataatttgtgtgttgcgtcattaatgaaatagtagtacgaaaaacctatagcatcttttactgcaggaggtaactttccatgccattttttcagaaaatctacttatgacttcagtggcttgctagactggcctttttatttgtacttttcctgtgtttcagaattgcagagtataataaaggcatgtcaagtgcatattgtgtccattttcaggtatattagataagctttacaccaagataaattagatatgcttattggtttaatttgtgctaatatatatttaattgaaaaatcaaaaaaatttttttaaattgactgaagttgtattccaaaacatgcaaaatttagtttaaaatagattggatacacttttaaattttaaacaaggtagagggtttagtgctttgcttttttaaaaagtaaatgaaggctgcagctttctgcagtagttgtcttgggaagtagtgtggacatcactcctaagagacgttaaggaagtttagctaacaggctttaaccctttctctccataccagcttttactcttttttttttttttttgagatggagtttagctcttgtcacgcaggctggagtgcaatggcaccatctcggctcatcgcaacctctgcctcctagttcaagcaattctcctgtagttcaagcaattctcctgcctcagcctcccgagtagctgggattacaggcatgcaccatcacatctggctaattttgtattttgagtagagacggggtttctccatgttggtagggctggtctctaactcctgacctcaggtgatccgcccgcctaggcctcccaaagtgctgggattacgagcatgagccaccatgcccggccaccagcttttactttaatgccacagccttaaattttctttcaggagaaattattttatgtaaagttacaaaggaaaataatgcttaatatctgtaagcattcgtttggtaagtttgctgcctcctcagtaagttttgatgaaagtgaattttgatgaattactaccttagccgggtagtgacgttaacatgtggcttagctgtccattttctaagatatcaagaaaccagcaacaataagtaaaattgttaaattatgcaagaatcacatgttcctacctgtcatcatttagtcttggttctatttgcatgtgaatatcctttagaatatattactcccagttattccgctttacttttctgaatctcttttcccatctcttgacttcaacttcagtatatggctcttgttccttctacctggagaacggaggcatgtggaagcccagaggattgaattcttttttttttcttttctttcttttctttttttttttttagatgaatagtctgcttaggaaatccatctccataatgtttacctggtatcgtgttgtaatgtcagaatgaagtggctgttcttccccttgagtcatcgtcccgaatgaaggttccccaaaagaaatcatcaacttatgtggtgatttccttttacctttaaaaaaaaatttcttttcatggaaagataatggaacatgtcggtaagattcatttctaggaaggcaaaggagtagtttatcatctaaagactctcaacctaaagctgttttagaaaactttccttaaaatgagaagccgtaggttttcgttgcattattttggctaattgaaaaataagaccaagtgcgttctgaccttcgtttctcttacctttatttttacaaccaccatttcaatggcccacttgctgatacaaatgattgtttaattttaaaaagcatttaattgaagtcaagttatttagaacctaatcatttacacgtctttgttgttgctgctgttttgcaagagtgaagagcttggagtcaggtgaatctgggatgaggtacagttgtcatttattagtcatgtaatttgtgacaagccacttaatctctctgaagacttcagtttcttcatttgtaaaattggcataataatgctgtccctagtagggaatatagaattatataatgggtcctttgtatatattggctagtattgctctcttacgatttggcactatggagacactgtgggagattaaaagaagatgatgaataaaaggtgacttcagctctgaagggctttatgatccatttgggagaacaggtaatgtagaatatactggcttcaaaagtggcaggtgtttagaagagaaaaggatacatgatgtgataggaggcaaaggcttgattgagaaggctgagaagacttagagtaagggttctcagccctgactggacattaaaattatctagggacaattcaatcagaattcctgggggtggggaccaagcatcagtattttaaagttccctggggactttaacttgaagcccaggttgagaatcatttaaacagctctgttatttatttatttaaaattttaatgtattttttgagatggagtctcgctctgtcacccaggctggagtgcagtggcgcaatcttggctcactgcaactcctgcctcccaggtccaagctattctcctgcctcagcctccccagtagctaggaatacaggcgtgcaccaccacaactggctaatttttgtacttttagtagagacagggtttcaccatgttggccaggctggtcacaaactcctgacctcaagtgatccacccacctcggcctcccaaagtgctgggattacaggcatgagccactgggcccggcctagttttactttttttttttgtaatggaatttccctctgtcacccaggctggagtgcagtgatgtgatttctgctctctgcaacctctgcctcctgcgttcaagtgattctcctgacttagcatcctgagtagctgggattacaggcagctgccgccatgtctggctaatttttgtatttttagtaaagacggggtttcgccatgttggccaggctggtcttgaacttctgacctcaggtgatccgcccgcctcggcctcccaaagtgctgggattacaggcttgagccactgcgctcggcccatttaaaaaaactttaaaggtagacgtattccaaatggggggaatatataaagaaaggtaacacttattttgccctgtgtgctttgaatttcagaaggtgtagtaagcaaagaccacttactaaccctacagatatatccttagaaaatacagtggtttctgtcataaatctgataaatcagatgagaggaagggtgtatgtttgatgttgatttttctttttgttttattggggtttttaaaaactataaatatcaggtctgatgactatgtgtataaacattttctaagtagataaaatattttcaaattttgcattttttagtatgaaggggatccatcatttgaagttggttttctagatgtgatgataaacttgtcccaggtctatttgacactcctaccaaaatcctttgtgaccagggctagaaggcagctgtggctagtaaataaccctgtgtgtagactcacttattggctttggcattctctattgccacagctgtgtgaatagattaaccagagaccctctggtgccagccacctattcaggcaaacaagtctataatcagtacctctgttaaaatgaaactgtaatatactattgtcttttcatttatttatttatttatttagagacagggccttgctctgtcgcccaggctggagtgcagtggtacaatcttggctcactacaacctccgcctcccaggctcaagcgattctcctgcctcagcctcccaagtaactgggaccacaggcgcaccattgcgcctggctaatttttgtattttttttgtagagacggagtttctccatgttgtccaggctggtcttgaactcctgagcttcagtgatctgcctgccttggcctcccaaagtgctgggattacaggtatgagtcattacacccggcctattttctgattgttcaaagtagaagccaggcacaatggctcatggctgtatgtaatcccaacaatttgggaggcagaggcaggaggatagcttgaagccaagagttcgaggccagcctaggcaacatagtgagaactcatctctacaacaaagttaaaaagaaaaattagccaggcatggtggcacatgcctttagtcccagctacttgcgaggctgaggcagaaggatcacttgaactcaggagttggaggctgcagtgagccatgattgagccacagtactctagcctgggcaacagagtgagaccctgtctcagaaaagaaaagagaagagaggagaagagaaagagagaagagaagagaagagaagagaagagaagacatacaaaagaagagtaacatacaagagaagagttaggagaccctgtctcagaggaaaggaggggaggggaggcgagaggacaagagaagaaagagttaggatctatgccctaaggaagtaaggaggatttgagactgtgtaggtggttaataaccttaagctacatattttatggagggaaaaatcctatttttaaaagtgagaatagaacaattttgaagtgaaatggaatgaattagctggaccataacggctctgactgaagaaaaggatgtaaaaagccacatcctggatatgtaccaaacaccatggttacatggcatgtttgtatatgtaacatttatttaaaaaaaaagtctcatagcttagaaggcatttatttttgttatgtgtataggcttctgtgcaataaagcagccttttttattttacagctcatgatgacttaaatggttaattgcctgataaatatggtcctcttttattcttctgattctgttgttcttttgcacttcatctttcaaggggttgggctattcttaggtttcactgattgcactggaagggacatgacggaaaatgaagatctcaagataattttcttgcaaattcacaatggaagataaaaggaaagagtggcaggcattctgcacacagagcagacgtttctttattgtcattgttcagcagaggaatcaactcagccttggtgaaactagagtgatgcccatggtggcatgtcagcatctccctcttagtggcatcagtgctagattgttgttgttggaagcaggagagtgtttagtccataaagtacagaacttcgatatcacagaagctagaagaactttactgccttcagcttcgtttaaagatagtagagagcttactcattcgttttagaaatatgtattgggtctctatgtcaggaactgctggcacagcagtgagattgaagatacaacagtgaatacaatagagggcctatcctcatagagtttgcctttcagaatgagggacagacgcagacaaatagaaaatgtcgattgtgtcagggagtattgagggctttgaagaatgaaatcgtgacccagaagagatgcttttagattggatcatccgtgaaggcctctatctagaaaggagacacttgggcagaattctgaatgaacttgacggacatctgaaggaaaaatattccagtcagaaggaacagtacgtgcaaagtccccaaaacttcaataagtgacgtgctccagaagcagcaaggaagcagaatgaggcctgaacagagtgggcagtaggaaatgcagtcatagagaaagcagggctgggtcacaggcctcagagactgtagaacattggctcctactctaagacaggaagctgctgtgagcattgaggttgggcgtggaaccatttgactttttatgaggatcactctggctgcagtgtggaaaatagactggacgagggagggcagttaggaagatgtcacggtaactcaggaaagcaataccggtgctttggacgagggtggtggcagaagagaaagtgagaagtattctggatatatttcagaagaaagtggataggattttctgatgggtgatatgtagagtgtaggagaaagagaagaagcaagattgactttaatgttttccacctgggcaattggtggactggaattgccacttgcagaagtgtggaggtatggaaggtatgggaagagcagattgccaggaaagttgagttagttttgaactcattgtgtttgagaggtctgttaaattatcaagtagtgatgttgaggtgtaattggaaaagtcaacctggaatttatggcagaagttgaggctgcagatataaacttgtaattttaaaaatgtatatttaaagccatgggagtgaatgagttcatttgagattgaatgcagattgagaagagatttagaattgaactccagggcactgcatagcaggaggaaaacctagtaaaagtggtatctgtaaaatagaggaacgaactgtcacaatttgcctggtactgaggattttctcagtacatgagactttaagagactgggacaccctgagacaattggttgccttccatgggaagaaagtatgtcaagagggagagagtgaacaactgtgtccaataaaccaggactgagcaaaaaccattgaatttggcatcatgaagtcttaggtgactttgacaaggcttgtctgttgtgaacagccaagtaaatgtgaggaccactctccaaaaggtaaagaaacatgcatgaggatacaggtgcgccagctggagacatcatgcctcttccccgtccccaccaggagtggcgtgaagcctccccagtgctgtaacgaggcagccaggtcctgtgtgactgcacatgtgacttggggcaagtcatttaacctctctgttttcactatcctatttgtgaaatattgtttagatttgtggtttgagtcagctatctgtatactacactgtgttaggagctatgtagattaattttcaacagatatggttctggggttgtaggaattttcaatttgagaacaaattgaatcttaccctttgtcaggagaaatagcctttgacatgtgttaggggcaagggaaatctcaaacttgcttaattttaaaaatgaatatttggttgtggataatttaagctttggtgatatttctaattattttttgtgtgtttctagtctactgaccagaagtctgaaaaaaacaactaaaaagaaagactgcataagccttcactagagaagtattgaaaattgcttgagggaagtgacggtttctttagcctagtgtctgtaggaccccagtgtagtgtttgttgaatgaatgaaaggaggcgtatcagtcaggttcactcagagaaacagaagctgtaggaaatccatatggatgtgtgtgaaggtattggcttgcctactgctggtgtgtggctaagcgagcttaaaagtccgcagggcagatagtcaggaaggaaatattcccaacagactgagctcccttgggcacaagctgaagcctggagtctgaactgccagagagcctctaccttcttagaaaaggcttcccactggctaagtcaggcccacccaggggaatctctcctttgattaacttaaagtcacctgtttagggactttaattacattggcaatagtcccttcacagaagcacctaaatgactgatgatgtaactgaaaaaatgtgtgtgtatgctacaaaatggctgcagtctcccttctgtcctccagctcttgcaggagaactctcttgtagctcaccctgtctgaaaacatactggaaaggaattcaaggaaatgtagttcagcctagccacgttgacacatcatgaagccgtcacaaaaggtaaagcctggtttaggagcatttgcatttgcagtcttaagtatttttgtcttatttttcaaaaggggttgggcacggtggctcacgcctgtaatcccaatactttgggaggccgaggtgagtagatcacttgaggccaggagtttgagaccagccaggccaacgtagtggaaccccgtctccactaaaatgacaacaattagccaggcgtggtggcgcatgcctgtaatcccagctattcaggaggctgaggcacaagaatttcttgaacccaggaggtggaggttgcagtgagccgagatcccgccactgcagtccagcaacggagtgagactctgtctcaaaaaaaaaaaaagtagttttggtttttaatttttgattttttcttatgttattacatataacgaatgatatgcatactctgaaaaatcatgacataaaggtgaccttgaaattactttgatgttcatttaaactagtctttggtctccactggctaggagaccacatatagcagaacagcagagaaagcaaaacagttaattttcatgtttggcttttgagcttccagggacccaagtcttgccttgaaccgatcttaggaaattcctcattccctacccgaccctgtttctaaactgcatccctgctgaaatgcaatgccactgtaactctctccaatatttgttttcttctttggcttaccactagatgtatgtatatatgtttgtgtgcctgtgtgtgtgtgtgtgtgtgtgtgttgactgcctcatagtaaagcctactcttgagattaagactcctgatagtttagagaacagaaatcttttttagttcctggttattacttgaatttgcaagaggaacaactgctaggaggcctagttaacagtagttagggtctccacccacttgccaagggcaagactagtttacaccacatttggaatgaccagtttcctcccactttagtttcagtgtagaaagagtaggggagacgaactattcaatgtcagcttgggtgtagtgccagaaccgtactcagtaatgctgtcattgctgttggtgcttaccagctcttcagtactggaatagcttcagacctcgagagtttatgactttatcatcaactgggtgtgttgcccttggcacattgccacacagtgcttaatgatgatatatgttctttatcaaattccccccaccaaataatggcattatttacgtgtgagaaagttgcacatttcaccacctcatggtttattagagtgcaattccgtgagaacaactgcctgtgatcctctgtatccccagtggccaactcaggagctcagtatgccctacccagtagatgctcagaacatcattgctgagtgaggaagtcagccatcattttctccctggatagtctctcctgtagataacaggggccgttatcagccaggtttttcatcatttgtggctttgaatttcagggacatgacaagtttgctttttgtttcgttttgttttttttttttttttggttttctagagacagggtcttcctgtcactcaggctggagtgcagtgatgtgatcacagctcactgcagcctcgaactcctgggctcagtgtttctcccatctcagcctttggagtagccagcagtataggtggtgtaccaccacacccatctaactttaaaaaaaaaaaaattgtaaagacagagtctcacttttttgcccaggctggtctcatactcctggctcaagcaatcctcctgcgttggcctcccgaagtgctgggactgcaggtgtgagccaccttgcctatccaacatgacaagtattattctctggcaggaagtgaaattttttctcactgatgattgcacacaaatgtcatatctccatgaggcttctactcactagttttacggctcatgtcaccttgcttcaaactatgcttcagtataattttgaagtgtatatttccattgcctctccttgagtaattgatattcttcacaataagtttacatttattatcacttttatttacttactattattactctgagcagccaatcttatgagaagctcagagtggaacgtgtgggtcctggtaaatatattatttgactcacttccaaacacacttaatattgcctggtgttttgattatttcaaaatatacagatttcttgaaaggcctgcaaaaggaaacaatcaaaattatagcggttaagaatgtgagtctgccttggtttgaattccagatgggccagtccctagctgtgtaatcatgggaaaattattaaatctctagcctcgctttcttcatctgtaaaatgagcatacaggctgagcatccctagtccgaaaatgcaaaattcaaaatgctccaaaatctgaaactttttttgtgcctccatgacgccacaagtggaaaattccacacctgacctcacgtgataggtcacagtcaaaacattgtttcatacacacaatacttttttttatttgtataagtttaagtggtacaagtgcagttttgctacatgaatatactgcatagtggtaaagtctggacttttagtgtctccatcacccaaatagcatccattgtattcattcaggaatctagcatccctcaccccctcccatcttcccacctctccaagcctttcatgtctagcattctgtgtccatgtgtacacattatttagctcccacttctaaatgaaaacatgtgatatctgtctttctgtttctgagttttttcacttaagataatggcctccagttccatccacgttgctgcaagagacatgatttcattctttgttatgactgaatagaattattcaggcacaaaattattaaaaatattgtttaaaattaccttcaggctatgtgtataaggtgtatatgaaacataaatgaatttaatgtttacatttgggttccatcccgtggatgtctcattttgtatatgtaaatatgacatgatatgaaaaattcaaaactctgaaacaccaattgaactcaatttgcagtaagaatgcatacctcacagggttatagtgaggattgaatgagacaatcctagtccaatttctttgcacatagtaatgctcaataattattacttaaatgggtataaactttatagtaatgaggttggggctggaaaaaatgcagtttcataatttcctatagaagtcattcaatcctgactctaaactctgtattccatgtggtggttgggtggcgtgggagagtcctctttatcctgtggggttggtcctatggaggtgtctgtggcagattggcagatgcatttgtcttgtgcatagatggtgtctgttgtttcctctggcagagttcaccagtgtcctaatgcaaacttagtcctcatctggctcctgcacaggctgatctctggctcctttagcccctcatggttcctgttgtttcattttcagagggacccttgtaaggactatagtcctctcttcagctgaccttcaggtccccagtcagaaccaagggaaccgactctgtcccttctcatagcacctgaaaaccccgggaaacgaggggaatgctttgctctcagctactgaggttgtcctgtcaccttctcttctgccctcctttgccatggcataggataatgtaagtcagcaatctcattactcggtatatagccagaggaatataaatcattctaccataaagacacacgcgtgtgaatgtttattgcaacactattcacaatagcaaagacatggaatcaacttaaatgcccatcaatgacagattggatgcagaaaatgtggtacatatacaccatggaatactatgcagccataaaaataatgagatcatgccttttgtgggaacatggatggaactggaggctattatcctttgcaaactaacgcagaaatagaaaaccaaatgctgcatgttctcacttataagtgggagctaaatgatgagaacttaccaacacaaagaaaagaacaacagacactgtggcctacttgtgggtgaagggtggtaagagggagaggagcagaaaagataactatgtggtcctgggcttaatacctgggtgataaaataattgtacaacaaacccccatgacatgactttagctatgtaacaaaccttcacatgtacccccaaacctaaaagttaaaaaaaaaatcccagacaggaagtagggcatattttgcctaatttgcagcttcatcctcactccctaacttacgccactcatgtctcctccatcatcagggacagcaagagtggggaggggacgaggcctgccacatctccattctctgatcttatttcctcttgcctcttcaacagcgctttgtctctcctctccagcttgaagcccttactctggtatgtgatttcaaagcgatgaaaaactggtttcgttagtacttcccttggatctgcccttgtctcccatcaaggcagtgcaagtaaagaatccaagatatttgttttgttggtccactggagggtagagatagagaaaaacagtaacttccccaccacccccaacctcccttgggctgatgactccaaagactgccataaatgaacacttcatagagctgctattaatatgacacaaatctacttgatctaagggattcttttactttcttagggtggtcattcctaagtctttggatttcacagaaaagaaaatatattttaattgaggactgacaaaggttgccaactttttatcaattataagaattgtttttataattaccatcaatttctattatttcttttactccccctctttccaactgtggaaggtaaaattgaagagcaaagaacacttatttcaaagtgagtaaatttagctatatgaaaactcagcagattgccctgagtttccttgcgtagctgcagtccagtggaaatttcttccagaccagcaccagtcgccccagtgacatttagaaatcactgccctggattgtttcagccaccgaaacactcggtgttcactgtcagctatgattatatatgaagtgctttcgagaaccaatgtatagcataacttaggccaaaagaaacactgtgcctaaacactcagccaaggagtgttgagtttgcctggatttctggaaaattgtctccgttccctagttcactgtatttgggtaaacaaaacatggcctcggagagcctttgcgggagaaattataaaaattcagcaaagctttgtgatctcattttggatctcctcaggattcctcatcaagttgcaattaaggagagaaaaattccgccttggggtgggattttaattactcatcatgttatgacttgactttctgtgctgcatttttttccatatcactacttctgtgtttgacagctcctccaaagagtcgctccgttttatgccaggagcgaagtacttactaagtcaaaggaaagcaaggcaaacatctactattgcctttgtgcttttaccagaaaactgggtgagaacctccttttccttttccctgcccctccagcctcagttttatgaccctgtggagccagtggactttgaaggacttctgatgacacacctgaacagcctggatgtgcagcttgcccaggagctcggggacttcactgatgacgacttggacgtggtgttcacgccaaaggaatgtaggactttgcagccctctttgccggaggaagg

SEQ ID NO: 15560 - DNA, 191457 bp, Homo sapiens
tacgcgccgtgtaactgtgaatctttcaaaggtatgttttactggagtgatttctggttatttcagaaggataatttgtgtgttgcgtcattaatgaaatagtagtacgaaaaacctatagcatcttttactgcaggaggtaactttccatgccattttttcagaaaatctacttatgacttcagtggcttgctagactggcctttttatttgtacttttcctgtgtttcagaattgcagagtataataaaggcatgtcaagtgcatattgtgtccattttcaggtatattagataagctttacaccaagataaattagatatgcttattggtttaatttgtgctaatatatatttaattgaaaaatcaaaaaaatttttttaaattgactgaagttgtattccaaaacatgcaaaatttagtttaaaatagattggatacacttttaaattttaaacaaggtagagggtttagtgctttgcttttttaaaaagtaaatgaaggctgcagctttctgcagtagttgtcttgggaagtagtgtggacatcactcctaagagacgttaaggaagtttagctaacaggctttaaccctttctctccataccagcttttactcttttttttttttttttgagatggagtttagctcttgtcacgcaggctggagtgcaatggcaccatctcggctcatcgcaacctctgcctcctagttcaagcaattctcctgtagttcaagcaattctcctgcctcagcctcccgagtagctgggattacaggcatgcaccatcacatctggctaattttgtattttgagtagagacggggtttctccatgttggtagggctggtctctaactcctgacctcaggtgatccgcccgcctaggcctcccaaagtgctgggattacgagcatgagccaccatgcccggccaccagcttttactttaatgccacagccttaaattttctttcaggagaaattattttatgtaaagttacaaaggaaaataatgcttaatatctgtaagcattcgtttggtaagtttgctgcctcctcagtaagttttgatgaaagtgaattttgatgaattactaccttagccgggtagtgacgttaacatgtggcttagctgtccattttctaagatatcaagaaaccagcaacaataagtaaaattgttaaattatgcaagaatcacatgttcctacctgtcatcatttagtcttggttctatttgcatgtgaatatcctttagaatatattactcccagttattccgctttacttttctgaatctcttttcccatctcttgacttcaacttcagtatatggctcttgttccttctacctggagaacggaggcatgtggaagcccagaggattgaattcttttttttttcttttctttcttttctttttttttttttagatgaatagtctgcttaggaaatccatctccataatgtttacctggtatcgtgttgtaatgtcagaatgaagtggctgttcttccccttgagtcatcgtcccgaatgaaggttccccaaaagaaatcatcaacttatgtggtgatttccttttacctttaaaaaaaaatttcttttcatggaaagataatggaacatgtcggtaagattcatttctaggaaggcaaaggagtagtttatcatctaaagactctcaacctaaagctgttttagaaaactttccttaaaatgagaagccgtaggttttcgttgcattattttggctaattgaaaaataagaccaagtgcgttctgaccttcgtttctcttacctttatttttacaaccaccatttcaatggcccacttgctgatacaaatgattgtttaattttaaaaagcatttaattgaagtcaagttatttagaacctaatcatttacacgtctttgttgttgctgctgttttgcaagagtgaagagcttggagtcaggtgaatctgggatgaggtacagttgtcatttattagtcatgtaatttgtgacaagccacttaatctctctgaagacttcagtttcttcatttgtaaaattggcataataatgctgtccctagtagggaatatagaattatataatgggtcctttgtatatattggctagtattgctctcttacgatttggcactatggagacactgtgggagattaaaagaagatgatgaataaaaggtgacttcagctctgaagggctttatgatccatttgggagaacaggtaatgtagaatatactggcttcaaaagtggcaggtgtttagaagagaaaaggatacatgatgtgataggaggcaaaggcttgattgagaaggctgagaagacttagagtaagggttctcagccctgactggacattaaaattatctagggacaattcaatcagaattcctgggggtggggaccaagcatcagtattttaaagttccctggggactttaacttgaagcccaggttgagaatcatttaaacagctctgttatttatttatttaaaattttaatgtattttttgagatggagtctcgctctgtcacccaggctggagtgcagtggcgcaatcttggctcactgcaactcctgcctcccaggtccaagctattctcctgcctcagcctccccagtagctaggaatacaggcgtgcaccaccacaactggctaatttttgtacttttagtagagacagggtttcaccatgttggccaggctggtcacaaactcctgacctcaagtgatccacccacctcggcctcccaaagtgctgggattacaggcatgagccactgggcccggcctagttttactttttttttttgtaatggaatttccctctgtcacccaggctggagtgcagtgatgtgatttctgctctctgcaacctctgcctcctgcgttcaagtgattctcctgacttagcatcctgagtagctgggattacaggcagctgccgccatgtctggctaatttttgtatttttagtaaagacggggtttcgccatgttggccaggctggtcttgaacttctgacctcaggtgatccgcccgcctcggcctcccaaagtgctgggattacaggcttgagccactgcgctcggcccatttaaaaaaactttaaaggtagacgtattccaaatggggggaatatataaagaaaggtaacacttattttgccctgtgtgctttgaatttcagaaggtgtagtaagcaaagaccacttactaaccctacagatatatccttagaaaatacagtggtttctgtcataaatctgataaatcagatgagaggaagggtgtatgtttgatgttgatttttctttttgttttattggggtttttaaaaactataaatatcaggtctgatgactatgtgtataaacattttctaagtagataaaatattttcaaattttgcattttttagtatgaaggggatccatcatttgaagttggttttctagatgtgatgataaacttgtcccaggtctatttgacactcctaccaaaatcctttgtgaccagggctagaaggcagctgtggctagtaaataaccctgtgtgtagactcacttattggctttggcattctctattgccacagctgtgtgaatagattaaccagagaccctctggtgccagccacctattcaggcaaacaagtctataatcagtacctctgttaaaatgaaactgtaatatactattgtcttttcatttatttatttatttatttagagacagggccttgctctgtcgcccaggctggagtgcagtggtacaatcttggctcactacaacctccgcctcccaggctcaagcgattctcctgcctcagcctcccaagtaactgggaccacaggcgcaccattgcgcctggctaatttttgtattttttttgtagagacggagtttctccatgttgtccaggctggtcttgaactcctgagcttcagtgatctgcctgccttggcctcccaaagtgctgggattacaggtatgagtcattacacccggcctattttctgattgttcaaagtagaagccaggcacaatggctcatggctgtatgtaatcccaacaatttgggaggcagaggcaggaggatagcttgaagccaagagttcgaggccagcctaggcaacatagtgagaactcatctctacaacaaagttaaaaagaaaaattagccaggcatggtggcacatgcctttagtcccagctacttgcgaggctgaggcagaaggatcacttgaactcaggagttggaggctgcagtgagccatgattgagccacagtactctagcctgggcaacagagtgagaccctgtctcagaaaagaaaagagaagagaggagaagagaaagagagaagagaagagaagagaagagaagagaagacatacaaaagaagagtaacatacaagagaagagttaggagaccctgtctcagaggaaaggaggggaggggaggcgagaggacaagagaagaaagagttaggatctatgccctaaggaagtaaggaggatttgagactgtgtaggtggttaataaccttaagctacatattttatggagggaaaaatcctatttttaaaagtgagaatagaacaattttgaagtgaaatggaatgaattagctggaccataacggctctgactgaagaaaaggatgtaaaaagccacatcctggatatgtaccaaacaccatggttacatggcatgtttgtatatgtaacatttatttaaaaaaaaagtctcatagcttagaaggcatttatttttgttatgtgtataggcttctgtgcaataaagcagccttttttattttacagctcatgatgacttaaatggttaattgcctgataaatatggtcctcttttattcttctgattctgttgttcttttgcacttcatctttcaaggggttgggctattcttaggtttcactgattgcactggaagggacatgacggaaaatgaagatctcaagataattttcttgcaaattcacaatggaagataaaaggaaagagtggcaggcattctgcacacagagcagacgtttctttattgtcattgttcagcagaggaatcaactcagccttggtgaaactagagtgatgcccatggtggcatgtcagcatctccctcttagtggcatcagtgctagattgttgttgttggaagcaggagagtgtttagtccataaagtacagaacttcgatatcacagaagctagaagaactttactgccttcagcttcgtttaaagatagtagagagcttactcattcgttttagaaatatgtattgggtctctatgtcaggaactgctggcacagcagtgagattgaagatacaacagtgaatacaatagagggcctatcctcatagagtttgcctttcagaatgagggacagacgcagacaaatagaaaatgtcgattgtgtcagggagtattgagggctttgaagaatgaaatcgtgacccagaagagatgcttttagattggatcatccgtgaaggcctctatctagaaaggagacacttgggcagaattctgaatgaacttgacggacatctgaaggaaaaatattccagtcagaaggaacagtacgtgcaaagtccccaaaacttcaataagtgacgtgctccagaagcagcaaggaagcagaatgaggcctgaacagagtgggcagtaggaaatgcagtcatagagaaagcagggctgggtcacaggcctcagagactgtagaacattggctcctactctaagacaggaagctgctgtgagcattgaggttgggcgtggaaccatttgactttttatgaggatcactctggctgcagtgtggaaaatagactggacgagggagggcagttaggaagatgtcacggtaactcaggaaagcaataccggtgctttggacgagggtggtggcagaagagaaagtgagaagtattctggatatatttcagaagaaagtggataggattttctgatgggtgatatgtagagtgtaggagaaagagaagaagcaagattgactttaatgttttccacctgggcaattggtggactggaattgccacttgcagaagtgtggaggtatggaaggtatgggaagagcagattgccaggaaagttgagttagttttgaactcattgtgtttgagaggtctgttaaattatcaagtagtgatgttgaggtgtaattggaaaagtcaacctggaatttatggcagaagttgaggctgcagatataaacttgtaattttaaaaatgtatatttaaagccatgggagtgaatgagttcatttgagattgaatgcagattgagaagagatttagaattgaactccagggcactgcatagcaggaggaaaacctagtaaaagtggtatctgtaaaatagaggaacgaactgtcacaatttgcctggtactgaggattttctcagtacatgagactttaagagactgggacaccctgagacaattggttgccttccatgggaagaaagtatgtcaagagggagagagtgaacaactgtgtccaataaaccaggactgagcaaaaaccattgaatttggcatcatgaagtcttaggtgactttgacaaggcttgtctgttgtgaacagccaagtaaatgtgaggaccactctccaaaaggtaaagaaacatgcatgaggatacaggtgcgccagctggagacatcatgcctcttccccgtccccaccaggagtggcgtgaagcctccccagtgctgtaacgaggcagccaggtcctgtgtgactgcacatgtgacttggggcaagtcatttaacctctctgttttcactatcctatttgtgaaatattgtttagatttgtggtttgagtcagctatctgtatactacactgtgttaggagctatgtagattaattttcaacagatatggttctggggttgtaggaattttcaatttgagaacaaattgaatcttaccctttgtcaggagaaatagcctttgacatgtgttaggggcaagggaaatctcaaacttgcttaattttaaaaatgaatatttggttgtggataatttaagctttggtgatatttctaattattttttgtgtgtttctagtctactgaccagaagtctgaaaaaaacaactaaaaagaaagactgcataagccttcactagagaagtattgaaaattgcttgagggaagtgacggtttctttagcctagtgtctgtaggaccccagtgtagtgtttgttgaatgaatgaaaggaggcgtatcagtcaggttcactcagagaaacagaagctgtaggaaatccatatggatgtgtgtgaaggtattggcttgcctactgctggtgtgtggctaagcgagcttaaaagtccgcagggcagatagtcaggaaggaaatattcccaacagactgagctcccttgggcacaagctgaagcctggagtctgaactgccagagagcctctaccttcttagaaaaggcttcccactggctaagtcaggcccacccaggggaatctctcctttgattaacttaaagtcacctgtttagggactttaattacattggcaatagtcccttcacagaagcacctaaatgactgatgatgtaactgaaaaaatgtgtgtgtatgctacaaaatggctgcagtctcccttctgtcctccagctcttgcaggagaactctcttgtagctcaccctgtctgaaaacatactggaaaggaattcaaggaaatgtagttcagcctagccacgttgacacatcatgaagccgtcacaaaaggtaaagcctggtttaggagcatttgcatttgcagtcttaagtatttttgtcttatttttcaaaaggggttgggcacggtggctcacgcctgtaatcccaatactttgggaggccgaggtgagtagatcacttgaggccaggagtttgagaccagccaggccaacgtagtggaaccccgtctccactaaaatgacaacaattagccaggcgtggtggcgcatgcctgtaatcccagctattcaggaggctgaggcacaagaatttcttgaacccaggaggtggaggttgcagtgagccgagatcccgccactgcagtccagcaacggagtgagactctgtctcaaaaaaaaaaaaagtagttttggtttttaatttttgattttttcttatgttattacatataacgaatgatatgcatactctgaaaaatcatgacataaaggtgaccttgaaattactttgatgttcatttaaactagtctttggtctccactggctaggagaccacatatagcagaacagcagagaaagcaaaacagttaattttcatgtttggcttttgagcttccagggacccaagtcttgccttgaaccgatcttaggaaattcctcattccctacccgaccctgtttctaaactgcatccctgctgaaatgcaatgccactgtaactctctccaatatttgttttcttctttggcttaccactagatgtatgtatatatgtttgtgtgcctgtgtgtgtgtgtgtgtgtgtgtgttgactgcctcatagtaaagcctactcttgagattaagactcctgatagtttagagaacagaaatcttttttagttcctggttattacttgaatttgcaagaggaacaactgctaggaggcctagttaacagtagttagggtctccacccacttgccaagggcaagactagtttacaccacatttggaatgaccagtttcctcccactttagtttcagtgtagaaagagtaggggagacgaactattcaatgtcagcttgggtgtagtgccagaaccgtactcagtaatgctgtcattgctgttggtgcttaccagctcttcagtactggaatagcttcagacctcgagagtttatgactttatcatcaactgggtgtgttgcccttggcacattgccacacagtgcttaatgatgatatatgttctttatcaaattccccccaccaaataatggcattatttacgtgtgagaaagttgcacatttcaccacctcatggtttattagagtgcaattccgtgagaacaactgcctgtgatcctctgtatccccagtggccaactcaggagctcagtatgccctacccagtagatgctcagaacatcattgctgagtgaggaagtcagccatcattttctccctggatagtctctcctgtagataacaggggccgttatcagccaggtttttcatcatttgtggctttgaatttcagggacatgacaagtttgctttttgtttcgttttgttttttttttttttttggttttctagagacagggtcttcctgtcactcaggctggagtgcagtgatgtgatcacagctcactgcagcctcgaactcctgggctcagtgtttctcccatctcagcctttggagtagccagcagtataggtggtgtaccaccacacccatctaactttaaaaaaaaaaaaattgtaaagacagagtctcacttttttgcccaggctggtctcatactcctggctcaagcaatcctcctgcgttggcctcccgaagtgctgggactgcaggtgtgagccaccttgcctatccaacatgacaagtattattctctggcaggaagtgaaattttttctcactgatgattgcacacaaatgtcatatctccatgaggcttctactcactagttttacggctcatgtcaccttgcttcaaactatgcttcagtataattttgaagtgtatatttccattgcctctccttgagtaattgatattcttcacaataagtttacatttattatcacttttatttacttactattattactctgagcagccaatcttatgagaagctcagagtggaacgtgtgggtcctggtaaatatattatttgactcacttccaaacacacttaatattgcctggtgttttgattatttcaaaatatacagatttcttgaaaggcctgcaaaaggaaacaatcaaaattatagcggttaagaatgtgagtctgccttggtttgaattccagatgggccagtccctagctgtgtaatcatgggaaaattattaaatctctagcctcgctttcttcatctgtaaaatgagcatacaggctgagcatccctagtccgaaaatgcaaaattcaaaatgctccaaaatctgaaactttttttgtgcctccatgacgccacaagtggaaaattccacacctgacctcacgtgataggtcacagtcaaaacattgtttcatacacacaatacttttttttatttgtataagtttaagtggtacaagtgcagttttgctacatgaatatactgcatagtggtaaagtctggacttttagtgtctccatcacccaaatagcatccattgtattcattcaggaatctagcatccctcaccccctcccatcttcccacctctccaagcctttcatgtctagcattctgtgtccatgtgtacacattatttagctcccacttctaaatgaaaacatgtgatatctgtctttctgtttctgagttttttcacttaagataatggcctccagttccatccacgttgctgcaagagacatgatttcattctttgttatgactgaatagaattattcaggcacaaaattattaaaaatattgtttaaaattaccttcaggctatgtgtataaggtgtatatgaaacataaatgaatttaatgtttacatttgggttccatcccgtggatgtctcattttgtatatgtaaatatgacatgatatgaaaaattcaaaactctgaaacaccaattgaactcaatttgcagtaagaatgcatacctcacagggttatagtgaggattgaatgagacaatcctagtccaatttctttgcacatagtaatgctcaataattattacttaaatgggtataaactttatagtaatgaggttggggctggaaaaaatgcagtttcataatttcctatagaagtcattcaatcctgactctaaactctgtattccatgtggtggttgggtggcgtgggagagtcctctttatcctgtggggttggtcctatggaggtgtctgtggcagattggcagatgcatttgtcttgtgcatagatggtgtctgttgtttcctctggcagagttcaccagtgtcctaatgcaaacttagtcctcatctggctcctgcacaggctgatctctggctcctttagcccctcatggttcctgttgtttcattttcagagggacccttgtaaggactatagtcctctcttcagctgaccttcaggtccccagtcagaaccaagggaaccgactctgtcccttctcatagcacctgaaaaccccgggaaacgaggggaatgctttgctctcagctactgaggttgtcctgtcaccttctcttctgccctcctttgccatggcataggataatgtaagtcagcaatctcattactcggtatatagccagaggaatataaatcattctaccataaagacacacgcgtgtgaatgtttattgcaacactattcacaatagcaaagacatggaatcaacttaaatgcccatcaatgacagattggatgcagaaaatgtggtacatatacaccatggaatactatgcagccataaaaataatgagatcatgccttttgtgggaacatggatggaactggaggctattatcctttgcaaactaacgcagaaatagaaaaccaaatgctgcatgttctcacttataagtgggagctaaatgatgagaacttaccaacacaaagaaaagaacaacagacactgtggcctacttgtgggtgaagggtggtaagagggagaggagcagaaaagataactatgtggtcctgggcttaatacctgggtgataaaataattgtacaacaaacccccatgacatgactttagctatgtaacaaaccttcacatgtacccccaaacctaaaagttaaaaaaaaaatcccagacaggaagtagggcatattttgcctaatttgcagcttcatcctcactccctaacttacgccactcatgtctcctccatcatcagggacagcaagagtggggaggggacgaggcctgccacatctccattctctgatcttatttcctcttgcctcttcaacagcgctttgtctctcctctccagcttgaagcccttactctggtatgtgatttcaaagcgatgaaaaactggtttcgttagtacttcccttggatctgcccttgtctcccatcaaggcagtgcaagtaaagaatccaagatatttgttttgttggtccactggagggtagagatagagaaaaacagtaacttccccaccacccccaacctcccttgggctgatgactccaaagactgccataaatgaacacttcatagagctgctattaatatgacacaaatctacttgatctaagggattcttttactttcttagggtggtcattcctaagtctttggatttcacagaaaagaaaatatattttaattgaggactgacaaaggttgccaactttttatcaattataagaattgtttttataattaccatcaatttctattatttcttttactccccctctttccaactgtggaaggtaaaattgaagagcaaagaacacttatttcaaagtgagtaaatttagctatatgaaaactcagcagattgccctgagtttccttgcgtagctgcagtccagtggaaatttcttccagaccagcaccagtcgccccagtgacatttagaaatcactgccctggattgtttcagccaccgaaacactcggtgttcactgtcagctatgattatatatgaagtgctttcgagaaccaatgtatagcataacttaggccaaaagaaacactgtgcctaaacactcagccaaggagtgttgagtttgcctggatttctggaaaattgtctccgttccctagttcactgtatttgggtaaacaaaacatggcctcggagagcctttgcgggagaaattataaaaattcagcaaagctttgtgatctcattttggatctcctcaggattcctcatcaagttgcaattaaggagagaaaaattccgccttggggtgggattttaattactcatcatgttatgacttgactttctgtgctgcatttttttccatatcactacttctgtgtttgacagctcctccaaagagtcgctccgttttatgccaggagcgaagtacttactaagtcaaaggaaagcaaggcaaacatctactattgcctttgtgcttttaccagaaaactgggtgagaacctccttttccttttccctgcccctccagcctcagttttatgaccctgtggagccagtggactttgaaggacttctgatgacacacctgaacagcctggatgtgcagcttgcccaggagctcggggacttcactgatgacgacttggacgtggtgttcacgccaaaggaatgtaggactttgcagccctctttgccggaggaagggtaaatagttttctaaaatgtagatgtgattgggattgtcatgattgttttcaataagtgggtaggggagatgccttcaatctgaacttaaaaataaaataaaattactcaatccattcaaatgtgtgggacagctatatgatatcatcatgtaagtatagatagtttttaaattagtttggccagagattttgaaaagctatgtgaagactaagccagtgcaagggatgcaggaggaccaaatgaaatgctcaagaggaggttaaaagtgcaggctctggagccagaccacctggctgccagctcagtgaccttggctgtcacatgacctcccaaatcctcggtttctccatttgtaaaaatgtcaagatttttaataataattactgaaatgccaccatccagaagcattttaattgcttacagttatgagactggatcaagttagaaacataaggtaaacccacatttattgagcatctactatgttctgggtactgagataaaaagatgaataagtcaaagtccctcctttaaagaaagtgtcatgcagtgctaaaacagtggggagagctctgtagaataaatatgtgaatagctaattagggcttgagtttctatagttggctcttctatatgtttataggcttgggcattagtttttggcatcaaactaactgtggaattgtagctaaatgaaacgcctgttgcttctaaaatgtaaaaaaaaatgtctctttggaggtttaggataaacttttatttacatttattttaaaagccaaattaagattcatatcctcctggacaggttccatcttctcatcttccccagaaggtcccagaaagaagatcctgacacacagcccctgccctctttactctgagatattctagttctattttggattttatttcatcacagtttaaggaggttggatgataatgggctggtattattgtgaaccgttgctctcttgttcagacagtcctcactcacataggagaactgaccatatgtgtagctctgatgttttaaaaatacacacttcccaggaaagaaaaacattgtcatttttgggaaacatactcccccattttcagtccatttattcaggtatgactttagtataagttaacacctactatttcatctttagtgaagaatcatttaatttattcctttatgtaaaatttatggatgtttccaaatatggtcagaatcttggaaaaagctgtttaaaatgcttacagtagccagtcaccgcagcttgttcctgtggtcccagctacttgggaggctgaggcaagaggatcacttgagcccaggaatttgagttcagcctgggtaaaatagtgagaccctgtttcttacaaaacaaaaacaaaaaacagtacaatgaatttagaggaaggaggaggtttttttttttttgaaatttgataaggaagataatttctttacttagcatcagttttttagtatactgttgccttgtcaaaagaatttataggtaacatacctgtctgatgtctttaagacagcctctactatttcagttgttgccaaaaagtcttctgtataattaaggcaggggaaggtatcatcatcacaccagagtaaacaatagctgactcctgttgaacaacctgtgcctagcccagaactttatgttgagctgtgatggcgtggtagtgaaaaacatgaacgctacaggtgagctgcctggattcaggtccctgctccaccacttgctgtgtgacttggaacaagatccttaccatctcatttttctgcaaagtgagaataatagtaatgcctgccctatggtgctgattgagaattaactgaattaatacatataaagtgattgcctcagtgcataatgcacagtaaatgctacctaagtgtaaactattaatatcatatatgcgtcttattgtgtgccaggcagtcttctaagcactttgcacactaaccgatttaatcttcatcaaagctgtctactaaaaggggcactcttactactctaacagctttaaggagaggaaactgaggcacagaagggttgagtgactggcttatggtcacatagctataagcgatgaagctgggatttgggcaattagggcccagagactgcatgtgtaacctttacaatattttatctaatactaacagcatgtctctgttcttacctccttatcacagatgagaaaattaaggcttgtagcatttaagcctgtttatttctggtactaatgcatttgcaacaatagcaaaaagctttgctacaattgttatttttgatttcaagactctgaagcacttgaagagtattgctcatggtgcattccttaagtagacatgacaggaaccaactgaattaatgatcaccaacaaaagccagtgtttgcaatttcatcaaagcataagacaactgttctttttcctggctttcaaaaaggagaacacgcgtgtcctaacaaggttacacatgcataaaaaatatgtccaaattaccctgtcagagataggtatttatacttattttccttgttttgtattcgaatacagctagttctacctgtcttgtgtctgaatgccttcggggatagttataatttaacatgattctgtataataaagaaaacccacaaagcaaaaaaatgccaacatgtttgtctcatcaaagtaaaaatgtttattgccccaggaatacttcagacatttggaatgattgggcaagaacatcctaagcattctcactgataaggatttaaattcgtgtcatgttccttgctcatgattaggggttgttttgttgttttacccagtaataacgtgtttatttcattttctacctcattagggttgaactggaccctcatgtcagggactgtgttcagacctacatccgtgagtggctaatcgtgaaccggaagtaagttactttttttccactttttgtatataaatattaattttatattgctagtttttaaatatttcttaatactttgaacagttctaggtttacagaaaaattgcatggcaaatagagttctcatgtatgccttccttatccccactccatatcacacacacagttccccctattatgaacatctcactttagtgtggtacatttgttacagtagctgagccaatatggatatgttgttattaactaaagaccatagtttacattaatgtttactttttgtgttgtatattctatgggttttgacaaatgtgtaatgacatgtatatgcctttacagtatcatacagaattgtttcactgccctaaaaatcctctgtgttccacctgttcatcctccctccctggcaaccactttccttttttactgtctccataattccaccttgttcttcaatgtctttttgtggcttgatagctcattttttttattgctgaataatctttcattgcatggctgtaccattgtttatttatccattaacttactgagaaagaaagttctattttaaacataaagaatagactgcaagcttgcccaacccctagcccgtgggcaacatggagcccaggatggctttgaatgtggcccaacacaaattcataaactttcttaaaacattatgaggtttttttttttgcgatttttttaaagctcattagctattgttagtgttagtgtatttgatatttggcctgagataattcttcttccagtatggcccagggaagccaaaagtttgggcacctggaatagagcctttttgttgtcttctaattctgatgaattcccagggggaaaaattaagtgaattgaaacctggcctcagcttcagaggtggcattcgagtttatgaccaagaaataaattacttgctggccttccagtaagggatctttctctcctggattaatcaaaccttctgtgacattgttctgagctttttctctccatgccatggacctggacagcactctctcatgagaaacatctatgcacattgaaattctcagcctgcatgggtgtacctgttggggagtgagatgtggactctctacagattagggcacaccccactagagacacgtcacagaacctttgacaagacattagtagtttaaaattctgatagcctcactcctcctatacctcagtaagaattactattctatggggtaaatgatgaaagactttgaggattgggttttatctagctcctggaagggtgccattgagtttgtgctgaggttttctggagtaatgtcaatatgcacacattttcagcagcagaaaaagagaaagcattcattattaaaagttattaagagaaagttagatgccaatccatcatctgttctaaaatgaatggaaaacaaagtttgctgggcagtcagataaaattatggtttgctgataataaataaaagatttcagaacaagttgttctcaagtttttaaatgctatcattagaggtactttctggacattaaagatctaaaaaaaatctgagaaggaacaaatagaaagatccattttgatacatttggttttcagatttattttctatttcgggcttgtccactttttcatttctcatggcaatgcacgcttcttggagtagtgatttttcttgatcttgcacaaatgtaagagaaaaaaatgactctttttggaatactcgttgaaattttagaaataattatgaaacacaaatcactcagtttcactctagacagataatcatcatgaacatttgatgtctgtcctttgaatagtgttgggtttttttggtatatatttgcgtgaaaactaaataagattataatatcatttttgtaacatgcattttcagttttcacagtaaagagtgattctcttcctttgctattaaatatgcttcctcaatacaatgattgatgattgcataatatatttataccaaaatttatttaaccaattttaatatttaggtgattccttccttttcagtgttgtgcttaaaatgcaaaaacatccttctcaggaaaaatttgtacatatttatgatttttttctttggaattaattcctacaagaggaatttctatgtcaaaggatatgcacaaatttaaagatttggaatactagatcaaacattatgccgggcgcagtggctcacatttataatcttactcagcactttgggaggttgaggtaggaggatcccttgaacccaggagttcaagaccagcctaggcaatatacagagaccccacctctaaaaaaattttttaaaaaattaactggatatgatgacatgcacctgtagtcctagctactcgggaggctgaggcaggaggatcacttgagcccaggaggtcaaggctgtagtgagtgacgattgcaccactgcacaccagcccaggcaacagaggaagaccctatctcaaaaaaaaaaaaaaaaaaaaagccaggcacggtgctcatgcctgtaatcccagcactttgggaggccaagacgggtggatcacctgaggttgggagtttgagaccagcctgaccaacatggagaaacccagtctctactaaaaatacaaaattaaccgggcatggtggtgcatgtctgtaatcccagctacttgggaggctgaggcaggagaatcacttgatcctctaaaaatagctaaactgggaggcagaggttgtggtgagccaagatcgcgccattgcactccagcctgggcaacaagagtgaaactccgtctcaaaaaaaaaaaaaaaaaaaaaaaaaagattattgacactacatgcatgaatcctcaagaatattagatgttataatttatcaacatttccaattttatttgataaaaggttgtcttttttttcattttcttttactattagattaggcatctttcttctatatatttcttggccattttttatttttcctggtgctctgcttattcgtgaaatttgtgcatccctattaatgtatttgtctagtctgatttatttttataagcacttttttggtaaagatattaagccttgtctaccatgtattaaaaatgtcttccccagtatgccttttgtcttttaaagttgtttttaattttcaacattcagaattatttatgtcattaaatctatattaatatttttccttatgtttaattttggcatcatgcttaaaatttgattcacaaacttattattattttctaagagtatgggattaaagcattaatccagatcattagccacttgactgttgcttctgttcccttatgtgtctccatttgtttttatcttttctacagaagcaatggttacccatatatttattatatgcaagtttttgcatcttgttcccctaaaaaagaaaggaatatgtgttttaattttatgtttggcaacattctagggatgggattaccattggcccagttctctgcacccctgtgtaatggagcagttcccttcttaacggtcacctagtggacagggagaagtgtacaacttcagaactcattgtcagtttctggcaagctttcttgtagaaaagttgcatctctttctatccctctgcctcattctcttgcactctgaatctaacactctgcccatgaaaactaaaattcctagcacacactcctcccagggatcattctgtctctatatgcacctgtcgtattttatctgtggggagaatccagtacactattgccagatgtccttcatctcccaacctcacacagtacatttttagcttattgttttctgtgagttgtatctgtattgttttagaatgatggtagaaggagaaggacaaggagaaggtggtgattcatataaatgaaaccagctggaagctgtgatgctttcatagataagccactattatgaagaaggagacttcagatttctgtatagacactgaccagggactcgtgggcaggaaggtgtgcaacaccttcttatctttattcagtgagttcccctttggggagacaaagtttggtacatccttctctttccagctccatctgatccacagaggttctgtccagattcaggcattaagttatctcttcatttggatgagtttccagtttttctgtgtcttcataagtggtttactagaaagtcggaggaggatgcaataggggttgctggccatttgttaattagtgattaattatttagctctcctttaattggttatgtgccaaatcatgtatgattgttttgaaagaaatcaagtaatatggaggtgcattaaggaaaaggcaaatctcatgcctcactacttaccagtgtcctacccttcccttaactcactcttcactgcgtaaagcccagctgtgtagcttccagatcttttcataccctcacaaaaaatatttgtctatttatatttttcacataaagatatatgtattaatgtatgtacttatatattacaaacatttctttaaaataactgtccatgtcagagctatatcccattctactgaaatgctgcctagtattcaaagggtgaaggaatgtgtcctaagttactgaaactaaatgaccattttggttgtcaccatttttcataattgcaaataatactgaaacaaacatatctgcacatttgccccatacatgtgtgtgaatatttctgagggtagaaatgaagccagtgtacatggtatgctctgataggtactgccaaattcttctccagaaaagtcgtgctgtttcattccattaccaactgggcattaaactggcgtgttcccatattcttgccagtgctggatattatttattaaaataaaatttcagttcctccagtcttcttttagttattattttaatctggaagctattacacctactttctgaatacagtttcctatcaccaagtttcctttccttatgtgttctaaaatcccagttaaatatgcacttaaccatacaaccgtaagtcccactcttgagtatttacataaaacctatgtgcaaatacagcagtttagcagttttatttgtaattgccaagactgcatagcagttttatttgtaattgccaaaaactggaagaaaacccagattgtactcagttgggtagtagataaacaaactctggtaaatccatacaatggaatactactcagcagtgaaatggaacaaacaattgatatatacaacaacatggatgaatctcagatacagtatgctaagtgaaagaagccagacaaaggccgggcatggtggctcatgcctgtaatcccagcactttgggaggctgaggcaggtggatcacttgaggtcaggagttccagaccagcctgaccaacatggtgaaaccccgtctctactaaaactacaaaaattagctgggcgtggtggcacgtgcctgtagtcccagttactcaggaggctgaggcaggagaatcgcttgaacctgggaggcggaggttgcagtgagctgagatcatgccattgtactccagcctgggcaacaaagtgagattctgtcttaaaaaaaaaaaaagaagaagaacccagacaaaaaagataactgcatgattccatgtatctgacattctggaaaagatgaagctacagggatggaaaacaggtccatggttcccagggtctgggagtggggaagagggctgactacaaaaggacacgggagtgccctttgcgtggtgctgggactgtagtgcccatgatgtaaaatctgccttggaccattacattagaagaaatcaattccagttatcccaatattccctccaagtgaaatactttggtagcatatataataataattcaataagtattagctattatatttattaagtagtacctatcagaaaacatacttatattagcatgtcaaaggaatgaacacaaaattctctcccatatattgaacgcaccatggaggggggacctgccttcctctggaggaccatacttagtgaagccactttgccttataaggacatgcctttgttatccagaaccaagcagtcaaacactgatttagttagctcctttatttctcagttatctcctgctgatattacatttctccataatatctagagataggcttttatgtccttgctagctgtggtaatggttttgaatcccacttagggggcagaggagtagagtaatggccacttgtgttccctcccaccctcatcattctacagggcatttgccactcaagtactgtaattgagacatttaaatcatacaaataatgctgcccatgaaggatagaggaaatttttagatttccttttaaacctaacagagaaagattaagttacataaaaatgtaaaatacatgatctccagtacattgaaggaaatgtattttcttacttgaaatgtttgtgttacttagactggaagatttattaaatgatttccattctatcactcatgtttacagcaccaaatttggtgtccttgttctaaaaacaatagtacttttctccccatgacttttgaaaatgattactggtttactgattagcatggcgccatgtttgcttgtttgtccaaccttttatctgcatattttgataatgttgtgtggattaatatttgatgacatcctttgggtgatattaacgattttaagctttatttcttctgtcattttctctaaatgaaccaaagagggataaacttcagaatgtttttgatgcctggtggagagctgaactcttaagaaattaaacttgtttacatactatatttattcttgccgcagagacagtgaaacatttcatgagtgttatgggcagcatcataaaagcctttagactttgtttttcatctggggtgattaaggtaattctgaaggaaggttgagctcaaggagagctgagatatcaaggaatggggtatcatctgttttattactccatattttactcccagtgaagtggtaaacaattaaaattcaaacacatcagtgcatataattcagttactcccagaacaccataaaaatgtttccctgatcaataattgcttattatgacatgcatttgttgtgctagctgtcaaggtgcttagctatttgctttctaaaagtatgaaaagcacgcccggctcatcagcctatgtggtaacaaagagcaatccagctgtggatgtcacagagccactcttgacctgttgtgcatagactccctccccacaaatccaaacccactaagactctccaggctctgttaacacacaccagcctggttcagcttggatgccctcctcacaccatgtgggttctgattttccatgccaggcagtccatcttaaatggatgcatcctcaccgtgtttgggcttcaacttcctattctggacctcctcggctactccctaccccaaggcatggagggctgccttgttctgatgcaccttatgattttagcaccaaattgtacaggaagggagagaagggaaaggagaaagaagatgtgaaaggaaagagagggtagggaagaggaaaaagaagatgaggaacacgtattattttctaatcctcacaataggtcctcaaaatgagcaacatttccccctatttcatacttgaggaagctgtgactcagagagactaaggcacttgcccaaggtctcttagtacattaaggagccagcgtctgcacccagttccttctgactctagagcctggattctgctggctgcaccacactgtctttaaagagaacactctcaaaacgcgcttggtctttggattgtctcaaatgtgttagaatagtgttttaagaaaaggaatgcagatctcctgggaagcaataggtcgagttcatttcatgagaatcatttttctagccattggcctacttccccatttttctcctgtctgcatctaggtgcaacaggaacttggctttatttgactccattgccagggtggggtaatgaagctgggactctcttgtagccagcggcagtgagccagcagtctcactgcctacccagtgatggttccttctgtggccagcacttctggaatgagtcatctttacatgtttgccaacccttgtcctctcctccccagccaggttcacccttgctgctgtcaaggagctttgagactttctgagatttttaaatggggaagtagatgttaaacctagtatgaggaagagagggaaagtttgctctggtttcaaacacacagtcatagaagatgctagtcttaatgctttccatagcaaaaaccctgaaggcttagagtgtacacattgtgaactgaacttttaacattattgtgtaactcatttgttaatgcctatttgtcattgactgtggggtccatgtgaaaaactcccacaaacactctaacaaaatggaagacagaaaagaaagcaagcatcatttgtgtacaatagccaaagaacaatagccaaataaatttgatggtctcaaaagttaagcatcttttgaagagaaaatttgattttagggccaggtggggtagctcatgcctgtaatcgcagcactttgggaggcagaggcgggtggatcacctgaggtcaggagttcgagaccagcctggccaacacggcaaaaccccgtctctactaaaaatacaaaaattagctgggtacggtggcgcatgcctgtgatcccagctacttaagaggctgagacaggagaattgcttcaactcgggaggcggaggttgcagtgagccaagatcatgccgctgtactccagcctgggtgaaggagccagactctgtctccaaaaacaaaaacaaacagaaaaaagaattgattttgattttttcagatacagtgcatgaactttttatcataaaatattaaagctggggaaaatatcttagaattcacctcatgttcatgctttaccctgtgaagaaacagaggcacagagagaaataacttgaggataatggaaacaagcacacatctgtaagtgtgtgtgtgtgtgtgtgtgtgtgtgtgtgtgtgtcagagagagagagagagatgttcctttgtaagtaaacactcttggaaatagccgcattttattataacacaaaaagtaatgctaaagctgatatagttctggttgctaagcttcacacacaaaaggtctttaggtagctgcttcctaatttttatttctgtggcccaaaagtctccttgtaaaccttcgtgtcatgtcatactaaacctttgacatcaataccctttaaaatgtacaagtccttaaaaaaaaaaaaaaggcaaagggcaaatactaatgtgggaaatttgaattttaattaactgtttgtttcaatgttaggataaattaatgttagataaattctttggtaatttttccccctaaaattggatttttcaagaaacatcactggttcagtatattgttatttggggtagcataattttaggcgataacttaatatttgcatatatttgtcactactttgagttggtttttgtcccctgacccccagccaggatgttagatcacacagatttttttttctttgagcccttagggagagtccaaaacagtcacttcatgtactaggaaagtttacccagtcagcacacacagatatgttgttgcctacatttatatttgtgagagtgactgttaagaaactagcaggtttataaaatccgtgtgagaatttctctcaaataactgttaatggacaatccagcaatcctcccatctcaggctcccaagtagctgagactacaggcaggtggcaccatactcggctaattttttgtgttttttgtagagatgcggtttcaccatgtcacccaggctggtctcaaactcctgggctcaagtggtgctcccgccttggcctcccagagtgctgggattacaggtgtgagccactgcacccagcctgtacattttccttgaaatcgtttttggatgtttagtcttatttccttattcagagttcacctgtttattttttttttcatttccccaatttagcctgcgtttcacccagccctagcaatataggtttgggtcagagaaattcaagcggccaggggatgctgaagatggcccattatggccgggcgcggtggcacacatctgtaatcccagcactttgggaggccgaggcaggcagatcacaaggtcaggagatcgagaccatcctggctaacacagtgaaaccccgtctctactaaaaatacaaaaaaattagctggctgtggtggtgggcgcctgtagtccaagctactcaggagactgaggcaggagaatggtgtgaacccgggaggcagagcttgcagtgagcagagatcgtgccactgcactccagcctgggcgacagtgagactccgtctcaaaaaaaaaaaaaaaagatggcccattgtggtaagccttgacttgaattagtcaccaagctagtcttatctcttttctaggctaattcttgttttttgtttggctcaaaacaaattgtttgtcttcagaacacaataaaatccagggagagtgtcctgttcttcctacagacgtcactgggacatcttattctttaattaattcagtcaactaaaattggtcaaatacctgctctctgtgccagagttataaactttgtatttgtataattgctagtagctctcttacatttcttactttatctatctggcatttgatctacctaataccttccaatatcacctcatgtccctttaccagcttggtggtttttctatagttcaggaaatcaaacaaaatggtgtgtgacctggaggtactagaaaaacaatagcaaaccaactccaaagccagcagaagaaaacaaataaccaaaatcagagctgaaaaaaattaaaacgtgaaaatccatacaaaagatcaatgaaaccaaaagtttgtgattcaaaaaaaaaacaaggttgatagatcactaactagattaataaagaaaacaagagagaagatcgatccaaataagcacaatcagaaatgacaaaaatgacactacaactgatgcctcagaaatataaaaaatcctcagagactgttataaatacccctatgcacacaaactagaaaacgtagaagaaatggatagattcctggaaacacacaagccccctaaaattgaagcaggaagaaattgaaatcttgaacagaccaatagtgagttctgaaattgaatcagtaatacaaaacccaccccaaaaagcccttaatcagatggattcacagccaaattataccagatatacaaagaagagctagtaccaatcctactgaaattatttcaaaaattcaaggaggaaggactcctctctaactcattctgcaaagccagcatcattctgataccaaaacctgggagagacacagcagaaaagaaaacttcaggccaatatccctgatgaacatcgacacaaaaatcctcaacaaaatactacaaaccaaatccagcagcacattgaaaagttaattcatcacaatcaagtaggctttattcctgggatgcgaggttggttcaccatacacaaatcaataaatgagactcatcacatagacagaattaaaaacaaaaaccacaggataatctcaatagacacagaaaaggcttttaacaaaattcaacatcccttcatgttaaaaaccctcaacaaattaggcattgaaagaacatacctcaaaataataagagccatctattattcaactatccacagccaacatcatactgagtgggcaaaagctggaagcgttcctcttgagaactggaacaaaacaaggatgcctactctcaccacttatatcaacatggtactggaagtgctagccagagaaatcaggcaagaaaaagaaataaaagacatcccaacaggaagagaggaagtcaaactagctctgtcacagtgcaggcaatataattctgtacccagaaaacactgcagaccctgctaaaaggctcctagaactgataaacaacttcagtaaagtttcaggatacaaaatcaatgtacaaaagtcaataacatttccacacaccaataatgtctaagttgagggccaaatcaagaatgcaattccatttattttatccttttgaataaaatacctaggaatacagctaatcaaggaggtgaaagatctctacaatgagaattatgaaacacactgaaagagatcagaggtgatacaaacaaatggacaaatattccatgctcgtggataggaagaatcaatattattaaaacagccatagtgcccaaagagatttttagattcactgctattcctatcttaattagcaacatcattttttcacagaatttaaaaaaaaaaacctattccaaaattcatgtggaaccaaaaaacctgaatagccaaagcaatcttaagcaaaaagaacaaagccggtggcatcacactgtgtgacttcatactacactacaaggctacagtgaccaatacagcacagtccaggtacaaaaacagacacgtagaccaatagaacaagataaagaaccagaaataaagctgcacgcctacagccatctgatctttgacgaagttgacaataacaagccatgaggaaaggtctccctattcaataaatggtgctggagcaactggctagtcatatacagaatattgaaattggacccctccttttaatcatatacaaacattaactcaagatggattaaggacttaaatgtaagacctaagattacaaaaaccctagagaaaaaaactgggaaatactattctggccattggccttggtaaagaatttatgaataagtccccaaaagcaatggtaacaaaaacaaaaattgacaagtgggacttaattaaactaaagagcttctgcacagcagaagaaactatcaacagagtaaactgataaccaactgaataggagaaaatatttgcaaaccgtaaatctgaagaatgtctgatatccagaatctataaggaacttagataattcaacatgcaaaaaaccaccccatttaaaaatgggcaaaggacatgaacagatacttctcaaaagaagacatacatgtggccaaaaaatatatgaaaaaatgcttaacatcactaatcattagataaatacaaatcaaaaccacagtgtgataccaactcacaacagtcagaatgcctgttattgaaaagtcataaaatagactgggcatgtggcttatgcttgtaatcccagcattttgggaggctgaggcaggaggattatttgaagccaggaggttgagaccagcctgtgcaatgtagcaagactgtgtctctacaaaacatcaaaataaatggaaaaaaaaaaagaaaaagaaaaagaaaattaactgggtatggtggcgtgtacctatactctcacctactgggaggctgaggtgggaagattgcttgagcctaggaattcaaggctgcagtgagctataatcacaccactgcactccatcctgggtagcagaacgagaccctgtctcaagaaaaaaaaaaaggcaaaaattaacatgttggaaattagttcagtcactatggaatgcagtgtgaagatttctgaaagaacttaaaacagaactaccattcaacccagcaatcccactactgggtctatacccaaaggaaaataaattgttctacaaaaacgacacatgcactcgtatgttcctcacagcacaattcacaatagcaaagacatggaatcaacctagatgcccatcgacagtggactagataaagaaaatttggtacatatacaccatgaaataccacacagccataacaaagaacaaaatcatgggggtttttttgcagcaacatggatgcagctggaggccattatcctaaacaaattaacacaggaacagaaaaccaaataccacatgttcttatttataagcaggagctaaacatcgggtaaacatgggcataaagataacacggtagacaccagggattactaaagaagggaggatggaagcaggtgtgggttgaaaaactgcctattgagtaccatggtcactatgtgggtgacgtcagtatcatgcatacatcaaacctaagtgacatgcaatttacccatgtaatgaatttgcacatgtatcccttgaacctaaaataaaagttggaaaaaaataaaagataagatatcccgtatcctcaataaaaataaaagtggcgtgtttgtgcacttgactttgtaacatgttttccaaagatgtctttgagtcataaaaatgggaaatacacatgttggtttctctagtcatcacttgacaacttacatgttttacctttcttatgatggtctgtctcatttcttcagtgacagggctagacattctgttttaaactcttcccacagctgtatattattcaacacaactttaacagagttcatagagtggagattgaggatgtttgcaaagttaaatcatttatttttattttttcttaaccatgtcccgcctgctttattcattattaagaacattgatgtgaagattaaatggttttctctatttttatcttcaaacgatctctatttgtggcttctgcacattgctagatttattccagccacttacactagggtcatagtttagcttcagctcggagccaaatgccccacagctgaaatgaccgcacctctgaagtggcattttcccaggccatgcctccctttaataatgagccagccagggggtaaatttgtatctcattacaacagagccttgtattaggcctggagaataattaaatgtgaggaattataattggttccctctttgaaagctctctcagcaccatgtctacacttaagccattacttttatttttaatctaatggtttgccgctctctctccctctttctctctccaaattaaatatcaaccataaaagaaaccaaggaagtccagaaatctgtggctttaaaaagactggatctcgaaaagattttcacaagacgcttccgaaacagacgtttgagtcggaaaccttggagtgcagtgaacccgctgctcaggtatttcctgtcaacaaacatggttaccaggttactgggctcttctgcccagggcatgctgtcagttttacaaactagaataaacgatagacgcatagaaagtttgagtaggaggaactttaccatctgagtcagtgattttttttttcaaacttatttgtagctgtagaaattggtgttcaaatgaaaacccagaaacccaatgattaaaatagaaaaaagtggaaaagctctaactgggggacagagacaccttgggcccatccctacgacagttcctgcagagactcttggtgcccctaaggcaaactacagagtaatgaaaagctctatgctgaggccagaatacctgcattctcctagtgattctaccatgtactaactctctaacttcaagcaggataattaaacttattgggcttcagtttcctcccctgggaaacaaggatggtaatactaactcatgaggttatttgagtattaaatgagttaatatccataaagaattagaataatgccaagtacacttagtgcctagtcaatgctggtcactgttattgttattgtcattattctttttcttttttttttttgttgagacagagtctcgctctgtcgcccaggctggactgcagtggcacgatcttggctcactgcaagctccgcctcccgggttcacgccattctgctgcctcagcctcccaggtagctgggactacaggctcccgccaccacgcccagctaatttctttttgtatttttagtagagacggggtttcaccgtgttagtcaggatggtcctgatctcctgaccttgtgatccgcccgcctcggcctcccaaagtgctgggattacaggcatgagccaccacgcctggccagttgtcattattcttataaagtaattacagtttaaaattcaagttaaagtgtacatattgtgaaatgagcttttaacactattctgtaactaattttttaaatgcctggggtcatttgaagaactccagcaaacactctaacaaatagaagacagaaagaaagcaagccttcatttgcataaaacggccaaagaacaatagccaaataaattccatgtttccaaaagttaagctctatacacctatgctcacagcagcattattcacagcagccaaaaagtagaagcagcccaagtatccatccataatgaatggataaacaaaatgtggtcgccaggggctgggggagggaggagtaggaagttattgtttaatgggtagagtttcggcatcccaagatgaacagcattatggagatggatgctggtgatggttatactgcagtgtgaatgtgtttaacactactgagctgtccaacctgcccattttatagatgagaaaaataaaattgagaagaaaaaatttgttcaagtttgcacagaacttcttgtaaactaatatagttttcagcttccatgtgtcttcataatacaggaatctcaccatgctggaaatgattcgaggtttttaaataatactaatttttcagacaaggtggtccccctaaagcaaagcccactacttacttggagcttcacagtagaatcagccatcatttccagcgctaaatatgacaggcttactgagggatagaatacctggatgctctgctctatgggagatttaaggaatttttcatcagtaattttgactgaattccattttcaccctacatgctgaccaattaaattgttcctcttaatgttagtcagatagaagccacggtaggtatttcagcagaagaaatttaacacagggaattgattaaaccggttttggaggtctgagagaaccaaaagggaaaaatggaggctatcctaaaatcgtcattatgggaaacagcacaccagcctggggctggggtatacggcagtggttctccacttcagcttcatcagaatctcccagagggtttgttcaaatataggttgctgggccctgtctgctggaatttctgattcagtaggtctggagggtgaacctcatactttttaattagcatttcctaagtgatgctgatgctgctggtcccaggaccacaatttgaggactgcaggtctaggggaagatcttggagttgtcagaacgtagaagctcagaagaggagcctgagagcaaggactgaaatccctgagaaggtactgcccagctggtggtgttgtctcaagatctcagagggaaaaacctcatgaagcctggactcacgcctcacaggaggagaaattgcccggctggtgctggtaccttcaaggaggtaagataagggtgattctggaagtaccaaaagaacctgaaggctagaaccagctgtcactacgaaggtgagaggaatagcaagaggaaggagccaggccctttgacctccttgaaccatccggtaaccctgtagtgctccctattgacagaacctaaagggagcagcagacacagcggaaatatgatttgctgacctagcatcaaagaacaaggcataaaagggtgaatttggagcccagaaacaataggtgaagaccagcgtacacacaaagcacacgctttcctgcagcatactagcagagaactcaagtcactgtgttgtgtgtggttttttttgttttttttttttttttttttttttttttttttttttttgagatggagttttgctcttattgccaggctggagtgcaatggcatgatctcggctcactacaacctccgcctcccaagttcaagcgattcttctgcctcagcctcccgagtagctgggattacagacatgcgccaccacgcctggccaattgtgtatttttagtagagacagggtttctccatgttggtcaggctgatctcgaactcctgacctcaggtgatccacccaccttggcctcccaaagtgctgggattacaggtgtgagccaccgcacccggcccactgtctgtgtttaagagccaacttgatcatatgatccagcagtctcactactagatatatgtccagaggaaaggatatcagtatatcaaagagacatctgcactcccatgtttattgcagcactattcacagtaaccaagacgtggactcaacctaagtatccatcagcagaagaatggataaagaaaatgtggtatgtatacacgatagaatactattcagccataaaaaaatgaagtcctgtcatttgcatcaacatggatgagtctagaggataagtgaaataagccaagcacagtaagactaatactgcatgatctcacttatatgtggaagataaataagttgatctcatagaagtagagggtagaagtggtaactagatgctgggaaggatggatggagaagggaatagagaggttggttaacggttacaaaattatagctagataggaggaataagttctagtatttgatagtactgtaaggtgactagaattaataataatttattctgtgtttccaaatagctagaagaaaggattttgaatgttcccaacacaaagaaatgataattgaggcaatgggtacactaattaccctgatttgatcattacacattgtacacaggtattgagatattacactgtattccataaataggtacaactattatgtgtctattaaatttttttaaagagccaaattgtacaaaagttgtttgttttgaaatattggaataatactcatcatggagagaatctcagactgcgagatgacagcaatgttttcaattccactctcattcttgtgcaccttcttattgagtagaatggtgaggccacatagctagatttataaaatttaaacaagtatatgataagattccttggtacacgtagattttataaaaattagattatattatgcataatattgcaaaacttcctttttcatattagcaatatactgtgattatctttctcttccaattaatacgtgttctttcttttttagagacagagtcttgctctgtcgcctaggctggagtgcagtggcacgatcttggctcactgcaacccctgcctcccaggttcaagtgattctcctcccttagcctcccgagtagctgggactacaggcatgtgccacgacacccggctaattttttgtatttttagtagagacggggtttcaccatgttagccaggatggtcttgatctcctgacctcatgatcccccggccttggcctcccaaagtgctgagattacaggcatgagccaccgcacctggccaggttctttcttttaatggctacataacattctattttatgaaagttccaaaatctcttaacacttcctttttgggggcatttagtttacttctattgttttgctatcacgaacagtgtttcagagatgcccttgccctcacattcttgcacacttgccagttataccctacggataaattcttagaagtgaaatttctagattaagggatgagtaatgttagatttttttacttatatgtatcttgatatccttttaaataaatttgggaaattaaagtcattttccttaaactcttataaattttaagaaaaacaaaagtattaataatcgaagtgttaatattgattatttctagcacattcagtttggggaaaatttatgatctagtagagtagtacttttgtgaggtagatgtcacaaaaaatgtgtagtatggagaaattgtccagtagtatgtccatttagtagaattttgagaataacattttgccataaattttatagatatttaccattaatccatttgtagtcctacaacatatagttgattacagttatacattttttgctgagtctttggttcaaagcatgcagttcccaattacaaagacattcctaatggaataaaacatccactttgtgactgatttaaggttgttttcttaaagcacaccgcagccaaaagtggacacagcttgaatagcaaattttttcctttttgttgttgttgcttcatccaataactgttaccaaattcccgtagaaaagtgttgcccactcccacatcgacctttggaagcataacattcagctttggtgtctatacacaatttaatttggaaggctcctcacaaatcatcttattttccagtttcaaaaaccaagttctgagtggagattaagacagggtctctttatttcccagtgcagtctcctatctatttatttgtgaatgaatgaattagttaattaatgagccagggtttcactttgtcacccaggctggattgcagaagaagtcatcgtggccaagcgtggtggctcatgcctgtaatcccagcactttgggaggccaagacaggtggatcacttgaggtcaggagttcaagaccagcctggccaacatggtgaaaccctgtctctactaaaaatacaaaattagccaggcgtggtggcgcgtgcctgtaatcccagctactcaggaggctgaggcaaaagaatcacttgaacctgggaggcagaggcagcagtgagctgagattgcgccattgcactccagcctggccaaaaaatgtgaaactccgtctaaaaaaaaaaaaaatccaatctttcctattggctttattaaatacactttaactttagaagcttagaagcacaataattagaactggcctaactttaaaaaaaattttcacaaagaaattagtaacttgtagggtcatttgtaatctttttctctgttgatttttacagttttaaaaagttaatacaataatttatttacttattttttgagacggagtctcgctcttgttgcccaggctggagtacagtggcaccatctcgggtcattacaacctccacctcccgggttcaagcgattctcctgcctcagcctcccaagtagctgagattataggcactggccaccatgcccagctaattgttttgtatttttagtagcgatggggtttcaccatattggccagtctgatcttgaactcctgacctcaggtgatccgcccacctcggcctcccaaagtgctgggattacaggcatgagcccaatattttaaaaatagtacattattacagaagctagatgtgcactttaaattattatcagaaaattagtatgacagacaaattctatgattgtcccatcatctgggcctgtgacattcacacctttgtgatgttcatccccgactgtgggtgggacctgggacttgcttctgtcaaaacaatatggcaaagcatgagaggatgtcacttgtgatcatattagatagcagccaaaatggattaaagacttaaatggggccgggcgcagtggctcacccctgtaatcctagcactttgggaggttgatggcggcggatcacctaaggtcaggagtttcagaccagcctggacaatatggtgaaaccctatctctactaaaaatacaaaaataaccagatgtagtggcggacgcctgtagtcccatctgctagggaggccgacgcaggagaattgcttgaacctgggaggcggaggttgcagtgagctgagatggcgccattgcactcaagcctaggtgtcgcagcaagactcggtctttaaaaaaaaaaaaaaggtaatcatacctcactgcagccttgaactcctgggcggggttcaagcagtcttcctacctaaacctcccaagtagctaagactgtaggtgcacgccaccatgcctggctaagttttgcttttttttttttttttaagagactgagtctcattgtgttgcccaggctagtcttgaactcccggcctcaagcagtcctcccaccttgtctacccaaggactgggattaaaggcataaaccactgcacctggcccagtctcctttttgttacaacttcctccagctctgttttgctctggtgtgagacatgagcatggttcattaagaggcttggcccccccagccccaggaaagaacaagccaacaaccgataggaatgtagtactgtttttagtcctttcctcaggactggtttgtctgcataagatgagtaactacctgcttccaggtgagaagaagacatttaattttagagtagtccagccaggaagctgagatgtcattcttatcaaatccgcagtttcttcagaagacttgaggcctggctgagattctgtagtcccaaattggagcagtcttgagacatccaagattcttcggttctcattttagacttgccgtctctctcacaaagacccactgttttctctcacaggcaggcccccgccacttaaacgtgctgtgcgacgtgtctgggaaaggccccgtcactgcctgtgactttgacctccgcagcctgcagcctgacaagcggctagaaaacctcctgcagcaagtgagtgccgaggactttgagaagcagaacgaggaggcccggaggaccaataggcaggccgagctctttgccctttacccatcagtggacgaggtgggtgccactgtttccatactggagaatctcagtgaagactctgagagtcatgtggacaattgtgttgttcattattactatatagcagcccatggtgtcagggctcacttgtatgatttctggggcctcgtttttcactcaggcaagcctgtgtgtcatagcagagccattattgattatcacacagatgggattctgataataataacaactggaattttcatagcactttacaaaatatgttcactaagagcatctcatttaatccccaaatgtttcaagggtctacatgtagtaatcacacccagcaagtcaaaccatcctattatttgaggggatgtgtggtcactaatccattgagacatacattacttaaactttgatgttctttagtgctttgttactttctttttaatggtctctatgagcaaccagagagacctgctttgaaaacatttcaggctaggataatcacagcccatgctcccaatgtatagaactttgggatcttgattgtttacttcttcatttattggagctgactgacaacaataggataatgtagactttgcctgtggtcactgcctgaggcactttggatgaaatgagaggtgacgattattcaagccttttgtctgtttgaactccttatactgtataggaggctctcagttttcccctctgcgtgaggttatctacacttctgggtcttgccagaacagattactgctatatctctgctgtccaaatggtattgaaagttcagttggaagaaacaggatttgaggaaactgcataaaagatattctatccatccatgcctctaaatatttgaaattcgatccttggattaagtgagacaatcagagagcctgatacccccacccttctggattgtgtttgctaacctgcccttcagtgagctcacgactggtcagcaaggaggacaataaaggaaacagcagtcatgagataggatatcacgtccacatggaaatactattgttgacattgacctactcaccatctagcaccttcctctttgatgatctaaagggcaattagccttcacatcttccgagaaagaagaagcacgcttctgctgagataatacaaacacttagagattgtgctcattttgtaactaactctcttaagttctttacttagagcaaacttctgtccaccttcaccaaatgtggcaacttaatgattggggtcctgaatttactccagctttcttttcttttcttatcctgattttctaagcaccttggtttcctcatctatttttattttatttgcagtttttgtcagcagcctcaaatggtcttctgaatgaggcagaatataaaaataaattatctcacttatatatagaatctaaaaaagtggatctcatagaaacagagtagaaaggtggttatagcaggggctgtggggagagggagaaggtgttggtcaaaggccacaaagtctcaggcgggaggaatacgttttagtgacctatcgcactgcacagtgaccagagttaataataatgtgttacatatttcaaaactgctttaaaaaaggatttttaatgttctcatcacacacacacaaaaggtaagttggtgaggtgatagatatgttaattagcttgatttaatctttctacaatgtatgcatagatcaaaacattacttgatttaatctttatacgatgtatacatagatcaaaacatgacactgtaccccatagatgttcacaattactacttgtcaattaaaaaataaattaataaagtatgaataatgtgagcaatatcatcatctcctttcctcagattaaaaagcaacaattaggctaaagagctttttcaagattcaacagataaattaaattacaaaatggggccctaacccgctaactacaaagttcgtgttcccttgtttatgtatctacatacatatgactacctggtatgttgggacacataactgaaatccaaatatgatatttttaaatatcatgtaactttttagtttccatccacgacattaagactttttaccagatttgtcaaaacatattaaatcagactgatttggcctttactttccttcctcttcctctcagttctgtgatggagatgccaacatgtaatagagggacccaaagtggatgccagaagagagagaacaattaaaggatgcagagaatatgtccagtgagacgtttgcttgtcagtgtctccctggtggtattagaggggagaatgttccatctgaacagattaaaataatgaaacgtagcctggttttagaggaactttgttttatgatctttgaaacaatgcagacgctccattgggactgaatgttataatctgggagcaggcctaatggggcctgcttttattgagtagagagaagtgcttcgtaattagtgttgcagttatttgtaaactggcgtgtctaaaatgcttgagggcctctataccagccctttaatattttgaagctgttgtcacagaaattgcatttgtatttataatttgtgctttctccaaagaaagttctatggaagaaaggtaaatttctgcctactctgacatgattacaaatgctggttttttcgatgacacaatcagatttttaaatatatcattacttgatttccctgtaaggaaagttagaagagaggtaaactagtatatccaagttatggctgagtctacaggagaagcaaaagttggacttaaccaccaagcttctataaggcaagttctttccctaattcattctgagtctacaaaaggcggttattctacaaaaggcattctatgtcaatccctaagaaagattccactgatactccaaattatagaaaagtttgctgaggctgttggttacaagtgacagaacccaactaaaaccaattcagaaaaaaaggctaggggagtacttcttggctcacctaagaaaatcacaggtaggcaaatgtggagttgacctctggatccattgggagagtaaatgaaagaatatcatctctctcatactgtctctttctctctcattatctctttcattccgttcatttatatatatttttaggatgatgaaaacaagaggtatccattaatgtttcacatttccactttctgtttgcttgggaattagttgccatttcagttagctataaagcctgaggaaattcatatagcttagaagagactgaggaaatatatcacccaaatgtcatatgtggaccttgtttggatcttgatttaacaaaataacagtaaaaacaaattgagacagtcagggaaatttgaaactgacaaaaattatttagtggcaataagaaattattaatttttaggcataatggtattgctgtatgtttttaaaagtctttatcttttaaagatatgtactgaaatatttatatatgtatatggtctctgggaagttgcttctatgtaatccagtattgagcgagaaaggtggtaagtgggtaaatagatgaaaccagaatgcccctgaattgaacttgttgaagctagatgatgggtgaatggttcttcattgcattgctctctcaacttttgtgtatgtttaaaattttcccaatgaaaatcttttttaaaaggatttcaaaaattagaatctagaccaaaggcagtcccagaaatccatgagtgtctctaccttcaggttgttttccagttagggagatcttccctttagatatgtctgttccaatgatcctaaaaggtccagattgccctgagcgagtaggcatcaaaacaatgtctcctctgaaataaactcagccattccacccagcaacatggccaaccgccgtaaccacaaggaatggggaccacagggagaggttggagtaatgatgagcttaccacattgatcattccatcaaagtgggtacatatttaccaggaaggtgactttactgctatttgcaagaatgttaagcttgctgtggggtattcactggaaagctcccaggaaaagacagtgagatgtgaccctgttctttggacccttgcgatgggcagagcactcaccagtgtttggaaagcatactgcaagagtgggaattactgttttcaaggatttgcactacttatttttgcatacatgaatataattaacatagaatgatagttcagatacagatgttaaggttacaataggggcttgatatttctctttaagtgtttagtttctgtgcggtaaaataaacaggtagagctcttaatttgtcattactaaatttcatatacctagcactttaggaagctctaactgcataagcctgtctagaacttgtcaattcaaccccaagtctctatcatctgtttaagaaaacagtgaactgagaaagtgactctgtattataggatcaatggtttacagccttaagtgaaccattctgactcagatttcaaatctgaaactcacatacttactagtaaagcccttgacaggagaaatattgcaaatgtgtaattagagtgggcaaaaaacacacaaaaacatcaacaataggtataagattttgcaatgccatctggtggatgttactaagccatatccatgttcacatttccttccttcctgcttcagtctctttgtcttgaatgcttgggtttctaaaaggagaaactgttttgctgcaaatgctggctttgaggttgggggttggaagagaaactttcttataaaaggcagagtgttagaaaaaaagcaaatctaagttaacttgagccgtggagggtagccttcccttccctgggttaactctaattggagctccccacagaattcactaatgatttccttacgatgtgattaaaaataggaggatgctgtggaaatacgtccagtaccagaatgtcccaaggaacacctgggcaacagaatattggtcaagttgctgaccttgaagtaagtatcaacaaacacactgccaccgctttgagatttatcttgccttttacatacaaatgttgtgtttattatcagagcttgaatcaaagcggagctcccaaaatacgtctaacagtgggcagctgtggagtagtagaaagggcacgtttgagtccattcctggattttttttctaccaacttcttgatggtcattcttctacaatagagaaggcaaacacacgtgtctactaaagttaggcaggtaaggtcattgagtgaaatgacctacattaagaaaaatagcgcttaagtcagtggtgtgctggagtcgactgtactaactcgtgagatctgacagtgcatatctcttcctgggttcggtgaagtcacattggtaactttaaattggccatggcgaaagtatttacaatgtagaaatcagccaatgctacacgtttgcaccaccctcagcacccggagattatttgtaaaacatttaccagtatgccactgttgaaacacaatgataaatgcaactgaaactcagtgccaggggacaatagggagtggtgaggactgtagtaaactatgttaagggggcactcactgctagcaacagactcttgccatccaaataaacaggcccatttttgtcaactgtcttttctattttttcaagagaagctgaaaacccagatttttctgcataatataccgactccctaaatatgttctcattccctttataaacaccatataattaaaacacgactacagtctggtttcatcttgtgggccaattatttgccacatctacttcaaagtagttgcatccaaacgtttcaattgtatactatgatagcaaaaaaaaaaaatcctctatagacatgtattaattttgtactttcatattaaaatattatctacattataaaacataatagaaattttaaagatgaactagataaatctatataaattctagtattttcttcttccactgcaatagattgtcttgtgtaccctcggagtgcctccatacctctcttcgtctctgcagactgctattttcaagaattagttctccttcaaatccacagatgaaaactttaaagttgtacatattttacctaagcaaaactacagaagcgtaacatttatttatatactattagatgggtcatccatctctcaaagtcacttcataggtcccttcagcggcccctggtttgcagtgagaaggcatctggattctggatgtaaggctgggtttcaacccctgggaacttccctgggattttgagttcttccctataaatgaagttgatagaccttatggtctcaaaattcctacctaccacaaacttctatgattctaacgcatagcctctgccaacttcttctgcctcagaaaacaagccagcaagtctgctcacacagctatgggtggtctcttgatattatagtctcctcccgctggccagttctaccagagggtcttcagggccttttgtacggagaaatgagcagcccataaaccagctgagtgtcaagtaatgggcacagaaaagcaagctcttgcccttgcaaaccaacctggcagtgggagcttcctcatctgtctggttggcgggaggactgagtggaagtggctcttcccctctgcattgtttaggaagccttcgctattgtctgagggacacacctgccccgacaggatgcatcatcaggctacttttagatgcagcgactatgtcatttgagatggcagaaattctcctctatggtgctcatagccaagctttctagacctctccagtgaatgagaggcagctgttctcacaggtgggaaaacatggtcactaagagagatatgtgttattttaaaaaaatgttaatggaggccaagtgtggtgactcacacctgtaatcccaacactttgggaggccaaagtgggaggatcgcttgaggccaggagtttgaggccggcctgggcaatatagtgagaccccctctctaccaaaaactaacagatgtgttaatttttagccctagctacattgggaggctgaggtggaaggatcgcttgaggccaggagttcaaggctgcagtgagctatgatcatgccactgtattccagcctgagtgacagagtgagaccctgtctctaaaattaaaaaaagaggagtcacttgaatatctcttaatgaaaattgtaaagtgcagtttctagtgatgtccccgcaactgccaaagcagaaattaagtcgaattgacatatttgccaggtgcacttggcctgctcatgtgttttaaatagtatctatactaacctataactgcaagagaagagatagaccaaaaagacagccctccgagtaactacttagagtaaactagatgaaagaaagaaacaaattcttataggtaagcctagaatgtgacagtatgaatagtaaaaatataagggtaatattaatggcaaatgttttcccatttacattgatatgtaggattctattcataatactacatgttttagcccctgaggaatttgtttaaagttgtagacatctgtaactgtctctgtattgcttttcagaaatatagaaaccctcaaagatacagagagaattagggtcctgccaattctgcaaatgtttgtaacagaaaaaaaaaaaaagaatgacaacaaagtatttttctgttttgtgttttaaatggagaaatattttaagatttaataccatcttatgaaaagtaatctcagctcttaggagtcttcttgatggtgaaactttaatgtgcagaaaatttgcccaggcagtttcttttaaatgcagattttggaggaccttccataacaatctccctcaagagattctggttgagtaggtctcaggtgggatcaagaaacctgcatgctggctaacttcttttgcttcaaaatgctagattctggggactacacttaaagaacaaacactcacggaaaaagcccaggttctgtgatcagagatggctgggctcaaaacctgaccgaacactcacggaaaaagcccaggttctgtgatcagagatggctgggctcaaaacctgaccgaacactcacggaaaaagcccaggttctgtgatcagagatggctgggctcaaaaccggaccgaacactcacggaaaaagcccaggttctgtgatcagagatggctgggctcaaaacctgaccgaacactcacggaaaaagcccaggttctgtgatcagagatggctgggctcaaaacctgaccgaacactcacggaaaaagcccaggttctgtgatcagagatggctgggctcaaaacctgaccgaacactcacggaaaaagcccaggttctgtgaccagagatggctgggctcaaaacctgaccgaacactcacggaaaaagcccaggttctgtgatcagagatggctgggctcaaaacctgaccgaacactcacggaaaaagcccaggttctgtgatcagagatggctgggctcaaaacctgaccgaacactcacggaaaaagcccaggttctgtgaccagagatggctgggctcaaaacctgaccgaacactcacggaaaaagcccaggttctgtgaccagagatggctgggctcaaaacctgaccgaacactcacggaaaaagcccaggttctgtgaccagagatggctgggctcaaaacctgaccgaacactcacggaaaaagcccaggttctgtgatcagagatggctgggctcaaaacctgaccgaacactcacggaaaaagcccaggttctgtgaccagagatggctgggctcaaaacctgaccgaacactcacggaaaaagcccaggttctgtgaccagagatggctgggctcaaaacctgaccgaacactcacggaaaaagcccaggttctgtgaccagagatggctgggctcaaaacctgaccgaacactcacggaaaaagcccaggttctgtgatcagagatggctgggctcaaaacctgaccgaacactcacggaaaaagcccaggttctgtgatcagagatggctgggctcaaaacctgaccgaacactcacggaaaaagcccaggttctgtgatcagagatggctgggctcaaaacctgaccgaacactcacggaaaaagcccaggttctgtgatcagagatggctgggctcaaaacctgaccgaacactcacggaaaaagcccaggttctgtgatcagagatggctgggctcaaaacctgaccgaacactcacggaaaaagcccaggttctgtgaccagagatggctgggctcaaaacctgaccgaacactcacggaaaaagcccaggttctgtgaccagagatggctgggctcaaaacctgaccgaacactcacggaaaaagcccaggttctgtgatcagagatggctgggctcaaaacctgaccgaacactcacggaaaaagcccaggttctgtgatcagagatggctgggctcaaaacctgaccgaacactcacggaaaaagcccaggttctgtgatcagagatggctgggctcaaaacctgaccgaacactcacggaaaaagcccaggttctgtgatcagagatggctgggctcaaaacctgaccgaacactcacggaaaaagcccaggttctgtgaccagagatggctgggctcaaaacctgaccgaacactcacggaaaaagcccaggttctgtgatcagagatggctgggctcaaaacctgaccgaacactcacggaaaaagcccaggttctgtgatcagagatggctgggctcaaaacctgaccgaacactcacggaaaaagcccaggttctgtgatcagagatggctgggctcaaaacctgaccgaacactcacggaaaaagcccaggttctgtgatcagagatggctgggctcaaaacctgaccgaacactcacggaaaaagcccaggttctgtgatcagagatggctgggctcaaaacctgaccgaacactcacggaaaaagcccaggttctgtgaccagagatggctgggctcaaaacctgaccgaacactcacggaaaaagcccaggttctgtgaccagagatggctgggctcaaaacctgaccgaacactcacggaaaaagcccaggttctgtgaccagagatggctgggctcaaaacctgaccgaacactcacggaaaaagcccaggttctgtgatcagagatggctgggctcaaaacctgaccgaacactcacggaaaaagcccaggttctgtgatcagagatggctgggctcaaaacctgaccgaacactcacggaaaaagcccaggttctgtgatcagagatggctgggctcaaaacctgaccgtgccagtccctaactgtgtagactttggcaagttccttattccctgggaaccttgctttcctggtgtgttaaatgcagataatatctgcattacgctgtagttgtgtaaagagactgatgtgtggaaagcacttattataacacaattttaagtctttaataaatgtcaattctctttttctttctcggaaccacagaggacttactactcagtaccaacctaagtatatcacagcaatattcaggccctttgtgtagtagggagtaaacaattaaatatagattgagcatgccaggcagcagctggtgagcctaggcccaggaaagcctccaattggcctggtgcagtggctcacacctgtaatcccagtactttgggaggctgaggcaggtgagtcacctgagctcaggagtttgagaccagcctggacaacatggtaagaccccatctctactaaatatacaaaaattagctgggtgtggtggcacatgcctgtagtcacagctgctagggaggctgaggccgaagaatcgcttgaacctgggtggcggaggttgcagtgagccgaggttgcaccattgcactccaccctgggtgacaagagcaaaactccatctcaaaaaaaaaaaaaaagaaagcccccaattaatgtgcaattacctaataatagaaagaataatcatagaaatcctcaacactgggcttttcggtggtaaaatgtatgtaacataaaatctaccatctttttttttttttttttttttttgagacagagtctcactctattgtccaggctggagtgcagtggcatgatctcggctcactgcaacttctgcctcccaggttcaagtgattctcctgcctcagcctcccgagtagctgggattacaggcacttgccaccacgctcggccagtttttgtggtttagtagagacagggtttcaccgtgttggccaggctggtcttgaactcctgacctcatgatccgcttgcctcggcctcccaaagtgctgggattacaggcatgagccactgcgcctggccaaaatctaccatcttaaccatttttaaggtacagttcagtggtgagtacattcacattgttctgcaaccatcaccaccatccatctccaggaatttttctcttcccaaactgaaactctgtacccgttaaacaataactccttattctccctactccccagcccctggcaactcccattctactttctgcctctatgaattttactactctaggtgcctcatgtaaggggaatcatgaagtaactgtctttttgtgactggcttcttttactcataatgtcctcaggttcatctatattgtagtatgtatcagaatctccctccttttatggctaaataatattccattgtatatatgtagcatattttgttatggcctcatatatgtatctgttcatggacaagtgggttacttccaccttttggctattgtgaatagtgctgctacttggcattgtttttaagatacattcacacacatcattatacgtgatcctcacaacaaccaggaaaatggaaaggcaagcatccttaccttattttgcagataaataaatggaattcagaaaggcgagtaacctgattagggtcgcagaattagcagatggtggaggaggaacagagtccaggtctctgcctgggtgccctgggagtctgccatgattccaaattgcctcatttccaaaggcgccatttgagcaaataaccctttttgtctgtgctcatattctgtccaaatattcttctaaaaagtcctcttttgagacaaagctatccattgatgaggacatcctctcacacatacctggagacaaaacatgactttattgacatgatgtctgaggtaatggtggactggggcccttttcctggtgctctctgcaggtaacatccaaagccatgggacatcaagctgagaaacttggaagaccttcaccagtgttccatgtgcacctgtaatgtccaccaagatactaaaggcaaataatgcaccaggattatgctttgggattcaccgtttcgaggggaattggcaattagggccaatatgagggctcatctttctagctctcatggggcccaggcacctcagtgtttatctgctgtgctcaagcccctccctgacctcaactcagcaactccccagtaatggagttaggaagggccagacattcatccccatcaaaacccagccttcttctgactgtcccactacaaatctaaggaaaagcaattgaacttttcttttgttgccatctgaaaagccccattccttagaattgaataatacagattctatcctttaaatttttttatttcaatggctttagggtaagtggtttttggttacatggatgaattgtatagtagtaaagtttgagattttagtgcacccgtcacccaagcagtgtacattgtacccagtatgtagtttttttatccctcatccccctctactctcctgcttctgagtctccaaggtccattataccactctgtttgcctttgtgtactcatagcttagctcccactaacatacagcatttggtttccattcctgagttacttcactcagaataacaacccccggctccatccaagttcctgcaaaagacattaattatttccttctattttatggataagcagtattccatagtgtatagataccacattttctttatctactcattggttggtgggcaattaggttggttgttggttccatatctttgcagttgtgaaacagatactatctagcaataaaatgtgaaatgtgaacaagtccattacctcagacagaaagtctaccctctgaaaacacagtagttacaataagaaggtgaatcacactaaaggtccattcagcccactctctcttgcagtgagtgagtgaatgagtgagatattccaaaaatatccaccatgcttttgtaatgtccaccatgatctcaaatgattaggaatttttcacaaacctcctatatttctctattaatatcccagtgcgattctcatatacttggagttttccaaatatttcgggaaactgctcatatttttaaccagtttatctatctaggtgttttcagaaaattcaaaattatctaactcaaagccacatagattttcctctctttctatggtaggttcgagattgaaattgagcccctgtttgccagcattgccctctacgatgttaaagaaaggaaaaaggtaagaaagcaaagaaaaatccatccctaaggcacatatattgttcatgattctttgcatgtatgtttttaaatttctttgcagcaagaacctatcagatttgaaagcaaatgatctttgatgagtccagttctgttgcctttgcaatttttcaagcagtggtctgagaatgtaatttatgatctttgaagaattttagagggagaggctactggaggtgctggcctggttggaatagagaaagaatgaaatagcgcatggggttatgtataaaacaaacccatttaaatacatttttaacaagcttggatgcgcatgtaaagcttcctcagtttgagagttctttgcactgtgaaataggctcatgactgaagggcatcttacatggtagaggtctcaatttgtcacagagttcagaccttaccaactgtaatgtgcttttaatgaaaacagtgaccaagacctctcgtgtgtttttaatgtttagtcattttgtgactcctagaagaggacagcaatagcaaatccagagtaggatggacacttctgcccttctttacccataatcattctgtatttaaggaaacaagcatctcctgcataaatattaataatcactgagatttgtaggataggttaactgctaaaacaagcagaacccaatctcagtggtttaaagcagtagttctcaaacttgagcatgcatcacaatctcctggaggacttgttaaaacacagattgctggacctcacccacagagtttctgattcagcaagtccaggtggggcctgagaatttgcatttctaacagtcccctgctgatgctgaagctactggtcaggggaccacattttgaaaaccgctggcctataagcaagaagttgctgtctttgtttctttaaccatccagggtgggaggagggacccctctgttccacgcagccactcagaaatacaggctggcagtggctcctccatcttcagtatgttctctccccaaattactcttgtcactgccattgctgcccctgaagaagagaaaagaaggatggaggaggcctggaagtttgatacattgcttctgctaacaattcactggagagaattgagtcacatgatcacccctcattgcaaaggaggctggtaaatgtagtctctgcctgggcagccactcaccactaaaattctcatggtgatgaaggagagaacccaaccatacagtggctcttaagtaatacgacactaagagagccaggagcactgttcacatcatgctcttgctcagaatcttcactaagattcattccctacaaccaggctttcttcatgatggcattcctctaccttctttccatccatagtctatgcagagtcaagctagaccgctgactaagcttcccccagccgttcaagcctctgagatatttattcatactctaatctctccctggcacatcatcaccttccacccctgcctatcagaatcttctaaggcccatccatctccagtgctgcttccatgaaaagttgtccttgtcacccaactgcaaatggcctgtcactctggaacttccacagtgcttctttgtatgcatgtggtgacttgtattttgcttttactgtagttagttacatgtttaccttttccctcacctttttttttttttttttttgagtcagggtctcactctgttgcccaggctggcatgcagtggggcgatcttggcttactgcaccctctgcctcccgggttcaagtgatccatcctcccacctcagcgtcccaagtcgctggaaccacaggcacatgccaccatgctggctagtttttgtattttttgtagaggcagggtttcaccatgttgcccaggctggtttcaaactcgtgagctcaagcaatgtgcccgccttggcctcccaaagtgctgggattacgagtgtgaaccaccacacccagtccttccctcattcttgattgtgaattaattgagagcagaggtcctcctcttctgtagtgaagtaactgatactcaggaaataccggtgggttaataaacatttaaatgtttcaaggaacatctctcaaatggctccagaatacctagacattgtgacaaaacatttgtcagatttatccaggagccactttcctaaaccacatctgtgattattacacttactccttcagcaaaatttctctgtggtgtttttactcctttttaacatgtttaaaccatgaatgcaacaggtctaacttatatttcactttgctgctcatttacagatctcagaaaattttcactgtgacctgaactctgaccagttcaaaggatttctgcgagctcacacgccttcagtggccgcatcaagtcaggcgagatctgcagtcttctcagtcacctacccgtcctcagacatctacctggtagtcaaggtaattcagtacgatctgatttgcccaatctgatgttttcattgctgtgttgttcccagcacatgtttggggtgcacgcaatctcagaatgtgtccacatatcctctgagattcactttgtttccttctcagtttaccccttttccgttctaagtaaactgtttcagatactagaaagactaggttttggagacacacagacctaggtttgagtcctggctttacaacctagtaattaaatggcattggcagtttcctggtctttctgagactgagtttcctcatctgtgaagtggagataatcacactgacctcagtggatagtcatgactacagaataaagcttggcacatcttgggcacccttctcctaattaaggagagttccctcagtgacctggtgcaaagaagctgctgtggagaaaggaacaaaatctctgggctagagtttcctaacgatgttcatgttgctctagagatgcatagttacgtgttcccaagtccagcctcttacaagctgaagcgtgggctgtggttttcaagtttcatcctccttttttttttttcttcttaccatgtcacagactgtctctaatgagagttgaaatctatggggcaattgtaagtagaagagcctttcattctaggctatactctttgctgttgtaagaaaaccagatcctttctctgtacaccaaaatgactggttagaaattaacaaacatcaggtattttacctaccttaggccagataattggtcttattgattcttttttttttttttttttttttttttgagaggagttttgctcttgtcacccaggctggagtgcagtgtcaccatgtcggctcactgcaacctccacctcccgggttcaaacgattctcctgcctcagcctcccgagtagctgggattataggagcccaccaccccaaaccaggctaatttttgtatttttagtagggacaggatttcaccatgttggccaggctgatctcaaactcctgatctcaggtgattcacctgtatttggttcccaaagtgttgggattacaggcgtgagccactgtgcccggccgtaaaatcattgtaaaaacaaaacaacaaattcaggtgtctgatttcatgtgcccccagcctcttaggtttggaacattatctagttagtacagtgttttatgtctgtagtctcagtgatcgccccatgatctcatggattccaaataattcaggtagctttgaggtcacttaacagatggcaaatgtcttttcactctagcttctttaacaccatataacaaagattatgagaggttactgtagcttgaggggaacttatttaagcttatagaagtatagttaaaattatattgctgaaaagacacttctattgttgtcaaacttcaatgtgtctccttttcgttgcaatattacttagacatacaggaaaattaaagcccactatgatagccctgtaggtaagttcacaattctctgtcagcctaggaaactgaagaagccaacactagttctatagagccaaattttatctcaaactctacttcccagtggatgactttctcttgattaatccgtcatattctgccaagtaacagtggttacccattggttcctatcacttactaaatatgttccaaaattttcaaatgtataaatgtgttcatttggcataacaaacatactaaagtgtttggataggtttaagaaattgaaatctactcagcaagacagcccctggttggctttctgtttgcttttctttatcgtaatgccatcattgttgcttctttccctttaaatatatagtaaatggtgttaaactatttagcacatccaggcagacattatttggtaagaggggcttctttcttttttgtttatattcccaggccgaacatcagggtctttactgtattttaggtagcatcatctagttcaggtgttgcatataatacggctttaagggattatttccgcttaaaagtttaattcaagattttgtgaaatttttttttaaaaagaatttgttttacaatcaaggaaagaagagtgaaaatgggattgaattggaaacttttcaaaaattgtttaaaaattggtatgccgtgcccaatttaaatatttcataagttgcgatgggcctatccttatgtaagggccacatagtttgagaaaacacaaagcagagagcctagcactttagaagtcttgcagatgttaaatttcccatcttaaagagtttacaatccagttaaaaaaacaacttggcattcaaagaaatgggttcaaattcctattttgctacatttgctgtgtatggtagcaagtttagtctgtcagtctaattggacaatgatccctgtgcctgagtggttttgaagaaaattgaaataatgtatgtaaaaacacctaccctgtacctgacataccataattaggtaaacaataaatggccatgaaatatgaaaaaaataggtatgccaagtgttaatcctaccccttctgaatagagcagaaagtagtctgttcccttaagaaaagttttaggttaatctgataggcttatttgccctactttccatggttatgaggagtcatgcatttcattacacacttttgcataaatcatgagggaacaaacaataggttctcatgtcggtctgcagctccttctcatgaagtacctggagttctccttgcccactgcagccagggcatagtatctgctggtctggtcaaatctgacttctcctgcttcctgtatgttccatgatacacactactagtgcatgaagccgtggcattccccttccttgcttcagggtcctaattaagaagttcttcatctctgttcagaatttattctaaagaccacatttttaatccattcacttcatggaaaaattagcttccttccaatttgttctacaagctcctgactatgagcttcaggagaatgggggcagtgtttatcgccaccttatctcccagctgctaccatatagaaggtactcaacaataagtaaacgattgctgattagcaggaatactggtcagtttctagctcaagtgttacgtgcttatgttttcagtgtggtgcatctctcagtgggattcgccttctcttcatgctgtggcaatgggagggggttttgaacttctttgatgagaagagagacttcctgcttggagtcctccctgaagcagatattcattgagtagcctcatgctgcttcctttgaaaccccataaatgcccctttatcatgggtattgttaaatactttgtgcctaactcacagcacctattaagtatgtgtcccttttgtactgtgttgacccaaattctttcttcaaggatcatctcaactgatgggactaaatccactggttttactcttcaacatctaagttaaattttttttgagcagagagttaggaaatttcaaatttctccttgtctttcttttaaatatggtgcccaaatttatgacaactggccagccagtcactttacctgaagcaagacagaagacacttcattcattcttattaccagcattcattcctatcaacagccagttagcaaagcaagaagctgcacatcccaatgcttttgagtttctttccaagtctgttaaatccagagaattagccctgataggaattacaagggagacaattacagataatttattcggttcagtcattcattttgtggaaggttttagtccctaacccaactttcacagagaccatatctcttttttacattgtaagcaataataaagaaaatgagttttccacttcctacgtatgtctcctgggttttgttttataaaataacttttattgctgtttttattatatacataatacatgtttattgtttaaaatagaaaatacacataagcaatgggaagaaaataaaaatcacacataatcccaccatagaaagttaactactattaacacttgctgcatttgctgagtatctactgtcacccttttaatatgcctttatgatttgttaaataaaattgtatgctattctttatataaattttttaataaaaaaatatgtatcacagatagcttcctatgtcatcaaatattgtcataaaatgtaattttgatggttgcatagattcctttttatggatgtaatttatgtgccttattttaatattctttttattggtagattgaaaaagtcctgcagcagggagagattggagactgtgcagagccctacacggttatcaaagaaagtgatggtggaaaggtatggtaatttgagtgttgttaaatggagacatcttagaagaagcaggtattttcagaagtgttacacaaatagttaatgggctttagtccctaatgtgtccctatataagacactactacattttaattaaataaaagaggaaaagaaaactggtcaccgatgatgactttttttttttttttttttttttttttgaggcagtgtcttactttatctcccaggctggagtgctggagtgcaatcacggccccctacaaccttgaactcctgggcttgaatgatcctcccccttcagcctcttgagcagctggtactacaggcacatgccaccatgcttggctagttttttatttttttttagagatggggtctcactgtgttgcccaggctgctctcataattctggcctcaagtgattctcctgcctcagcctcccaaagtgttgggattacaggcatgagtcaccatgcccagcctgatgatgattttttagagaaataaatccttgaattttctaatgttgacatacagcaaggtctgactgcataacttgattggggcaaggccaccccctgttgtcttcattctgaggctctgactcagctggttgggaggtccgtggagaccccaaaactaaacagtgccagagctctcctggccttcctcaacagcatgggccgctgccctttcaggtatgcaaataactgggaattggctgccactaccatgcattatatatattcattagcacagcataggtgttgagcctatgaaaaggatatcttttctcaacagcaatttgcaaagattcccagtgtgatttttaaaacatggccttggccgggcgtggtggctcacacctgtaatcccagcactttgggaggccaaggcgggcagatcatgaggtcagaagattgagaccatcctggccaacacggtgaaaccccgtctctgctaaaaatacaaaaaattagccgggcatggtggcacgtgcctgtattcccagcttctcaggaggctgaggcaggagaatagcttgaacctgggaggcggaggttgcagtgagccgagatcgtgccactgcactccagcctgggtgacagagtgagactctgtctcaaaaaaaaaaaaaaatagcctttctggaataagacttaccttattagtattgtactctacagactcataaatgtcaagtaagatttattgaactcaaggcattttttttttaaaatctgtcttttattctgaactcagaaagaacaccttggaagtattgtaaacttcctaaggagttgttaggaagctttttagaattttttggagttttccaaggtgacttttggagaaacaggttcacttgggagcttggtagatgatatactaaacttgatttcaagattcttttatgcaaatccaagtcacatagctagccaccaaaagaattgataatctgatgtaatgagtctctttttgttttcgttagctaaaaatgtattttactaattaaatgtagcctttttgtaaactcctcgttttttaatctttatttccttatcagctagacccaagtgcatcatttttctgcctattcactgtttttattttttagtgggaagatatgtttttactctttttaatcagtagggtttggattttggagatggctgtcatattcaggtcagaggcagttgacttggtgctgatgcttgtttcagcttgtttctttccattttcctccagagtaaagaaaagattgaaaaactaaaactccaagctgaatccttctgccagcgtttggggaaataccggatgccctttgcctgggcacccataagcttatcaagcttcttcaatgtctccacccttgagagggaggtaactgatgtggactctgtggttggtaagattttcacctgcagtgggaaagggagggctccccagtgtgcgctgcccaggtccacagcttactagcggggactgggggcacagtgaggtgtgggaagtggggaggcagaaggagataaatagaatgaaacactgttatgactggattacgtagatttggacggtgatctccaaaagaaattatcacgaacattggtgaagattaagtatactcttatagtaagattttctagatggtatgacactttaaaaagctgatttttgctagccacccgctctcaaaagtaaaactttaacaagaaaatgtagtaaccatctgtagtgtgttaagcagagacaccatggtcgactcctaaacctaaaaaaaaaagcctctgttacaaaggcttcaaaaagcaaaactcaacaggaacagggcgtggtggctcacgcttgtaatcccaccactttgggaggccgaggtaggcggatcgcttgaagccaggagttcgagaccagcctggccaacatggtaaaaccctgtctctactaaaaatacaaaaaatttgctgggtgtggtggtacacgtctgtaatctcagctactcgggaggcagaggcaggagaatcgcttgaaccagggaggcgaggttacagtgagccgagatcaggcctctgcactccagcctgggcaacagagcatgactttgtctcaaaaaaaaagaaaaaagagaaaaactcaagtttcccagcaaaatttccagttcgttaaagtttactttgccaagtgcaatgaaaaaatgggcatccaaagaatatttactgttttagtttatttagcatatttctttttcgtcatctcacccgtgatctgaatcattcattcctacactgcttggtgtagaaattttcaaaagggttgcaaattttcaagtagacctgcccatatcacctgtggtggggtttctctttccctaaatgcttttgtatccaccaaatatagaagtccatgttcacatcttttcatgcattccttaagctaaggcttaagccacttctgaaatactaccttgagcagggaagtggaggaaagggcattttgtgattgctgctgctattttggagttactggtacataatcaccagtcagaactcctgggttatttctggttcgtcaataacaaacctcactttaccacatcctgatcttcctgccacagctttctttaatgccgtctatgtagacccaagtaacttattgataagagttatgtatagagcttagagggcacacaagctaggtaattcaggatagggcatgctgaggcctcaatcatctctaggtcaaggataacctgacaacagagactgattcttaaggagcaaccagaagatgcaaagatgtcatgtattatactgaggcagaatggcaagtttaggtgggtagaggtagcaagaaattctaattcaacatcatggtaagaattaaggataagaagatactcaaagacgggttggaactgctctagttctaagcaatttgattatttacaagagaacccatgagtttttgcaatataaaagcaacaagatctccacccaaatcccaaaaggggataagaaacaactgggcaaactatcagggtcccagcccaagtctgagtgtgatttggggttctaattcccattgggcagatcacccaaggcagaaactcagtcttgctgcctggtccacataatgagagcagaggaatgctgggattcagagtgtacacaggctgaccccagcatgtttgggtcacaatcacaaatgccttcaggggcatttgagtacatgcctctcccagtggaatgcaaatatagaaataaaagaaaagcaaacactgtgctgactaaataaagcttatcaggagaccctgttctggctatagctctggactcttgccgggtggcatttgggctaccctaatttccatgtgggaggggcccatggctgctcctggcctctctcctctggtcggaggaggattaaggacaccaacaggaggactaagaaaggtaggggccaatggaaggacattttcattcaaaacaaggatggccatattcagtgttcctgatcagtgactttaatcatacatattgtgaagttaataactgctgtgtgtttgaacagaaaggcatactttggagtgacaattgtttttcttaaagggagaagctcagtgggtgaacggaggacattggcccaatctagaaggctttctgaaagagccctctccttggaggaaaatggggttggatccaacttcaaaacctccactctgagcgttagcagctttttcaagcaggtatctcttcacattacagtgtgtctggatttttccccatactggcatgggcactggaacccacaggaggaggatacgtagtgattaagagagcaaattagttaagctcactctcttagttcattttctgctgcttataatagagtatctgaaactgggtaatttaaaaagaaaagggatttgtttctttcagttttgaaggctgaaaaatccaaagttgagggcccacccttggtgagggctttcttgctggcggggcctctctgtagagtcctgaggtggagcacggtgagcagctgagcatgctagctcaggtctctcttcctgttcttataaagccaccagttcccctcccatgatgcagattaatccattaatctgtgaatggattaatccagtcatgagggcagagtcctcatgattcaatcacgtcttaaaggctccacttcccaacactgccaccatggggaccaagcttcaccatgagttttgaaggggacattcaaaccacagcattcacaaagcctcaatttcattagccagaaaacgggaacaatagtacttaacttcatgtggctagcaggaaggtcaggtgacatgagacctgtcaagctcttcttagagtgcctggaatacagtaagtgctcaatgaatgttagctattttaactgagagaagggttaggttttgttccttgtgataccaactatcctatttgaactatcttggccaatccattcattatgctatgacaacagtctggctgggccatctccttcccggtggatctcagggtttcttggcctggctattcatgtgcaagtttccactttcactactgcttgatgtgcaagtttccagggctccctgcttgctcagagagggtgaccattccagatggtactctttgttagctcagtaaacatcaagactatttaaaaaaataaaaaacttcctagacttgtcaacggtatagagacagaaagtagaatgacggttgccagggtctagggatagaggggtggggagtcactggttaaagggtacagagtttcagattttttttgcaagacaaaagcattctggaggttggttgcacaacaaagagaatgtgcttaacactactgaattgtgcacttagaaacaggtaagatgggccgggcgcagtggctcatgcctgtaatcccagcactgggaggccgaggcaggtggattatgtgaggtcaggagttcaagaccagcctggccaacatggtgaacccccgtctctactaaaaatacaaaagttagccgggtgtggtggtgcacacctgtaatcccagctacttgggaggctgaggctggagaattgtttgaacctgggaggtggaggttgcagtgagccgagattgccccactgcactccagcctgggtgacagagtgaggctccatctcagaaaagaaaaaaaaaaagaggtaatatggtaattttatgttagttatattttgccacacttaaaataaactcgcttggtctgactctgttttggaaagttttccatagctacgcagtcttcgtggagcatttaaaggggttacattaacaaactgaaatgcaaaagggatgctgagggcgcctgtgcaccgtgccacatcatagaaatagtaaaggtctgaaaaggtttctattcagcatacatgtacccttcccaatcttatgaccttggaggacaaggtacttaactaagtctggatggtctcactgggaataagacatatctacccacttaccttactgggttgttgtaaggattggagatcatgcatgtgtgctcctgacccatcttgggcatatgtgggggtggacagcatttatacttaaccttgttcgagacaaatgtgaagaaaatgagatggaaagatgctttctccaccttcgaacatttgaagaagaaagtaaacttattctgtattgttccggggggtaatactggcatcagagggtgagagttatcggggggaagcttttggcctggttttctaatggtcagacgggcttccttagaatgcagcagatgccccatccccagaaggactgataagaggccgaggcacagtgagtcacagtgattgagaaggatttaacaagaagtggagctcagtgatttcagagctgtctataatcctaatttctatgaaagacttgtgagaataaaacttaaaggtaaaaatcttcccagaaatcgtttgtccccaacccaagagtcaaaggtgcatctacattaactctgacttttctcttggcaggaaggagatcgccttagcgatgaagacttattcaagtttttagctgactacaaaagatcatcatccttacagagacgagtcaagtcaattccaggtgtgaatgacttatctttatcctctttagctgtgccaaaactgcttatcgttagacacagtctttgtctaatgccagaatttataaaatcatgtttgccaagtgaaatgtgagattttgtgttaggggttaagaatctgaattgttctatgtctttggcaaacctattaatgtttttttaattttcttaaaggattgatttagtaaacaaaccttgtgctttagatctggtttctcagataatgagataattgtttaaacagaggagcccctttaatcaaataaaatattatacttagtattaaaaaagtaaatgtgagatgctttggtagaaggcaaaggcatcttccttatcctcactcggcagccctggaggtacttctgtagcatcctcaggtccagggaagccagtttgtgtttgtttttgtttttttgagatggagtcttgctctgtcaccaggctggagtgcagtggcacaatctcagctcactgcaacctctgccttccaggttcaagtgattctcctgcctcaacctcccgagtagctgggactacaggtgcctgccaccacgcccagcttattttttgtatttttagtagagacagggtttcaccatgttggccaggattgtctcgatctcttgacctcgtgatccacctgcctcggcctcccagagtgctgagatgacaggcgtgagccaccacatccggctggaagccaattttaaaactcccaatttttactgctagcaatgcagggaagttacttaacaatgtaaaattatactgtggtaattcaggaaagaactttaaaaatcctctaatccattccttctcattttacaatttcttgctttatattttattttatagaggctaaatctcgaaagttatcatgacacacttttctcaagctgtaggaaattagctccaaaacttttttacagtactatagtttgttcttattttcatgaaagaaacacagtgcaacaatctttcttgattccctcataacatgacagtttctttactagaacattcctattttctctctttaggcttgctaagactggagatttctacagctccagagatcatcaattgctgtctgactcctgaaatgctgcccgtgaaaccctttcctgaaaaccggacacgcccgcacaaagagattttggaatttccaacacgagaagtatatgtccctcacactgtgtacaggtaagaaacacaggctcgggctgggcgtggtggcttacaccataatcccataactttgggaggccgaggcaggaggattgcttgagctcaggagtttgagaccagccttggcaacatggcaaaaccgtgtctctacaacatatacaaaatttagctgggcatggtggtgcatgcttgtaatcccagcaacttggcaggctgaggcaggagaatcgcttgaacccaggaggcagaggttgcagtgagccaagattgcactactgcactccagcctgggagacagaaccagactctgtctcaaaaaaaaaagaaaaaaagaaaagcaggttcttggaaaaccgttgagctcacattctgagttttatttgaataacgttttctcatccttcaacctgtcttcctacttcctaagtttcagggaaatgaaatgtgatatttatgtaaccgtaggtgattgccaaatctctttctaaacatagtttacctaattctctttaacaagaaagggttacttcagatgtaattgtagtttaggattatagtggacatatgttttccagagattaaaaaaaaaatctgctagccattacctttgttctcctctgtgcagagggacatattagaaaaagagcaatgtgaccaaaatgtgctagttgtcaaaaggacaggttttcagctaaagattagctctttccaacagaatttacagcaataacataataatagcacacattccaatagcatttacagcaataacagaaagttctgtatgtgtgccagcagtacaatagccactaatcacatgtagctgttcagcatttgaaatgtggccagtgcaatggaggaactgaaaaattgattttaattaattttaatttaaagtcaagtaactgtatgtgtctactatattggagagtatggagctagacactgaaggcctaacaggttgggctgccttggtttctgaatcgcttatggtggcacctgacctattccatggggtctggaaggagtgcttgtcaacacatatctgccaaaggcattaatgctcatgcacttctttattttgagactatttcctttaatgcagaaaaggatgccttctataaaaatcatctcttccccaccatccagaaatgacattgttgttttctgtgtttttatataaaagaaatacagtggtactgattcagttgaagtcttcttttatccccagtctccagtcacagacttttacctcacctcctagacttttatcatcatgaaattatgtatttcctattttttctccttttacacacacttacacacacatctgtgaacgctcaatggcattatcttcatattcatttaaaatgtacgcaaatgacttcacactctaggtcaggggtccccaacccccgggccatagaccattactggtccttggcctgttaggaaccaggctgcatggcaggaggtgagcatcgggtgagtgaagcttcatttacagccactccccattgctggcattaccacctgagctcctcctcctgtcagatcagcagtgacattagattctcatgggagcatgaatcctattgtgaactgcatatatgaggcatctaggttgtgcgctccttatgagaatctaatgcctgatattctgtcgctgtctgccatcactttcagatgggaccctctaattgcaggaaaacaagctcagggctcctactgattctatattattgtgagttatataattatttcattatatattgcaatgtaataataatagaaataaagtgcacgataaatggaatgtgcttgagtcatcccaaaaccatcccctgccccccgctgccaccccagtccatggaaaaattgtcttccatgaaaccagtccctggtgccaaaaaggttgaggattgctgctctaggtgttatattacactttgtttttgtcactcaaaagattgatttgtttttcttttttctttttttttttttttttgtttgagtattactatggagtcgtgagtcatttttctttctacttacccagatttccacaagttttaccaatgggaactttttaatggcttgcatttttggaaatatcagtattgattcatgtaaaggtttgtgggtttttttggggtttttttcgtttttttgtttttttttgagatggagtctcactctgtcacccaggctggagtgcagtgacatgatctcggttcactgcaacctccgcctcacaggttcaaacgattctcctgactcagctgcccgagtagctgggactacaggtgcctgccaccacacccagttaatttttgtatttttggtagagacagggtttcaccatcttggccaggctggtcttgaactcctgacctcgtgatccacctgcctcggcctcccaaagtgctgggattacaggtgtgagccaccatgcccatcctgttattccttttaactgctgtttagtattcctttgtgaagaggccatattttattcatttccttgttgatacgcatttaagtctttttcaagttttcagctcttacaaacactatgaagtaagattttttgtctttgcccctctgtacacgtttgtgaaagtttctttaatatatctaaaagtgaaattaccagatcacaagtaatacacatttcagtcttaagttttctaaaattttacatttgcagtcctaacagcagtgtgagagaattcccattttccagttcctcacccatactttccagtatgacgtatgtgggactaaaatgcaaagaacttcagagctcacctgatccaagcattcccacccccacatttccagatgcacaaaattaagacccggaaaggataagtgaatggttccttgaggtcaaaaattacagcgaggtggccagacacagtggctcacactgtaaccccgctgctttgggaggctggaggactgcttgagtctaggagtttaagatcagcccgggcaacatagtgagacccccatctctacaaaacattttaaaaattgcccaggtgtggtattgtgcatccctgtagttctagctacccagaaggctgaggcagaggattcttgagcccagaaattcgaggttagccttgtgccactgctctccaaatcaagcaacagagtgagaccctatctctaaaaaaaaaaaaataatttagaaaataaaattatactgagaaatacaaacagctattcacacaggaatggagagttcttctttacagtattcaggaggtatacacttatttccccatttaatccttcctggagcagctcttcattttcaatcctcattccttacatctaaacttagtccccacgtctccctcctagaggagataagcattctcaggatgcagtagtttcgattctctattccttagaggaagatgaaggcatgaaaatgtttgcttatggatgctttgtatctttttagaaactttatcctataatcgggaaacaatgcttgtggcattggaagagacttgcatccaatgaattctgtagttattcaacttcccctcagcatttaatcacccacaggtggcatttacaatgttctctactcgttcctgcaaacattatcccttaattacatcacagtgggacttagagtgcattagtgcactgaatgatccagaaatgtaggagggcaaaggaggacaagtctggacggattacaatggacccaacttgtcatcatgagaaacagacccacaaatacagagttaatcttcttgagctgtactggccactgtagaagtgccaaggacaccccgttagaaatgccaaggccaccctgttagaaaccaggtcttggggaatgacagaagagatttctctccagtttggttgtggccccttctcttggctcacagttcttctctgtggctctcaggccaccatattttatagtctatttaaggaaagagagagataatgaacttggtttggaatcttacttcatgaaaatttcacagaatttaggaagcatcttgtctaaatatcttgttctaaatttttagtgttcttctccagtccttgtgtgctttagggtggttttgattagattgggcttgacagttacccagtcccagatgagtgtcccctttcctgcacctccccccattcacgacatggaaatggaaagaatcgagtgaggtctgaaccccaggtaaaattggcaagctgactaagttcgccttgggtgacctcaccttttcatttctgtccattttcctctctttttgttccttgccatctccccatatctcaaaaaacctggaccttgtagcttttctatactggcccccaaaataaaagtctcttttcaagcaacgatctctaaactcatttgctatggtattgataacaggtatggattagtcttatcactcccaagagtattatcattttgggccaggtgtggtggctcacacctataatcctagcgctttcggaggccaaggcaggtgaatcacctgagtgaggtcaagagttcgagaccagcctggccaacacggtgaccccttgtctctactaaaaatacaaaaagtaactgggcgtggtggtgggtgcctgtaatcccagctactcaggaggctgaggcgggagaatcgcttgaacccaggaggcagaggttgcagtgagctgagatcctgccattgcactccagcctgggcaacagagcaaaaaaactctgtctcaaaaaaaaggtattatcttggcagggacagcagttcctatttcttaattgaagaaatccagatttcttctcattccaagagtctgtcaggtaactttcactgttgatgttgctatttccatgccaatcaataatcctgatcatacctgtatcccttaaggaaatcaaataactgaaaatgaagatctgtggggcagataaattcaggaatatttcttcgtttatagaggattcacctcatgaatttgaaatatggcttggcttataaaaagttgatctgcctggagcttgtagctaacacctctgtcgggccaaacaataaatgcttacactgagaaagccaggtttgggatttcaaattaatgtgcccttaacataaactgcagagcccccctgggtggagggaactattacctggttctaatagcagatgttttctggccttgagtgccagtggtaaccagagtcacacattttaggattttggtattgatgagggtttcagctgaatattacttgagttgaactccagttatctttacctgtcttaaaggagcagctgccatagtgcctcaggtaaagttggcttgggataggctggcattgccttccagtccccagcctcaccttcctcccacctcttcactgcctcttttctttgccctgccccttcaggtgtcctgcgtggggcaccattcgagttgcattctagtgtattaggttggtgcaaaagtaattgcggtaatgtgtgtgtgctgccccgtgtctctaccttattcaagtttctttaaggaacagctgtagatgagttctggtagaactgggtagtgctcccagaagtatccccgtgggtccgtgagggttgggcattcataaaataaatccttgctctaacgatagagaccaacttctagagccagaagtgctcatcccaggaatgaccaggggctcccaaaccagcggctcgggccctctgcagtgccatgtgcagcctctgtgggttagaggcatggagctagagcagggtcctctgaaccagagccaggcaggacactctgagaaatcacaagcagaaggacagcaattctgaaagcagagcagaacagctggaaaaactgagctgatgaaaaggattatccgaatccaagcttggcgttccttgctctgtgtccagattaagaaaatgctagtggtttgcctaggaacacatttgcaccaactcctggcttattttccatgtgacccaacagctggtactagagacaccagctgctttctggtgggggcagaatgaaaacagcatgggctgaggccaaggcccagcaaggtcttcaagggcatcctatcctgcggccgccagaggggtatgtgcggagatcacaggcaatgaggttgtaatgagctgttaagctccctgccgtccctttaatgggtgattacagtaaaaagagccacataaagtacgttttcatctctcacttcagcccccgagagcctctgaggtcttgtttatccaattatcagacttgctgtggaggacggtgcttgctgagaacaagcatatcagttggaacatgatttctctgatggataattagctgttttcaggactcctcctattcagctgaatgttctcagaccagaagtctgatctggcctaacggggatgtgctcccatatcgcagtggagtcttaaggagtactacccaccttctcttctgcgggggaaaaggaatggcgtagcatgcatgcaggacctgaccggaaggaatgtctgcgagttatgatttagtgactagaacttctaaggaaagaaatgaaccagaaataactgcaaacgaagtggttaggaagaggggcaggacatggggagtatccttgaaagggacttaatttcatccaaggaaataggttcccagtttaagcccagttagctctgtattcagagtggatcttctcagtgctaggtgaaggaagggtggttgtgcatcagagtaagtgtccagccccaccctgaagactcccattcaggtggtctgggatggggcactggtggtctgacactctcttttgttcaaaatcaaagcgtccccctccttctcatggaagggaagcttccaccaacccttaatgagttcctgtaccatatggagttgtcaaatgctccataccgggcacagcggctcacacctgcaatcccagcactttgggaggccgaggcgggaggatccattgagcccaggagttcaagaccagcctaggcaacatagcaagaccctgtctctacaacaacaacaaaaaaattagccaggggtgggggtccacacctgcagtcccagttacttgtgaggctgaggtgggaggatcgcttgagccaggaaggtcgaggctacagtgagccgtgatcatgccactgccctccagcctgggcaacagagtgagactctttcaaaaaacaaaaacaaaaaactctgtcctaagtatcagatgatgcggaagcccagtacttggttttactaggcttagcaagcagtcgcttatggaacagaagcttttataaacaaaccatgtagttaggaagggcagtggcagcccaggcaaaatctagtcatttgaattagccaaggaacggagacaaagacaaagtgaatttctggtgctagttgcaacttggtctcgataataaatcaggaacacaatccccacattcctaatgccttgctccaaaactcagcaatcctcctatttgtaagaatgaaaaaattcaggagggaaccaattgcctaaggttatgacagcaaagctaccgttccagtataatattcagccactagaggacacaattcactcactttctagattcagacacacgactacctttttcgttacaaaacatatgaagtcgtgatttatgaaagtaggacacatattgtattttttgcccttgaagtgcaagaccaggaaaaactgaaaagtattgcagcatcctccgagatcactgttgtcattttttcgcaaaggattttattctagcctgtcagtttctgcctcctttcattagtaagtcctgaccttagacatctggcatttttttggaaggtgtagtggggagggggaccaagagatgcatcccttaatgtagctaaagatcgaaatcttctcattttggggagagttgcttactatacatatttacacattcaccaattttgtctcatatgtaaaccacagaatgtgccgaattttcctagaatcatggttgaggcaggtaggagtaaggaggtgctgtgtacattagtgtcactgattccaccgttcacaactccataccactctccttattttatactcttgagtccacagtgctttggtgttacagcccatatagaacggtcctacctaaaagtcctgcggtcggtttaacagtgacgagtgtcatttttccactgtcctttacatagaattcagcaggaagcttcatgaggcaccctgtttctacatgagttgccctggttggtggaggcagaagcaatggagaagtggtgatgaaattaagtcaaagttaggcttgcatttgactctgatcttgaatagtttgtctagattagagggagcacctaaaatccaaaaagccttttgtctttgatttctatacttttgttagttttacaaattattatttaaaatcagtcctttgaagtggcttcttctcttctgacgggacagctttgggaaactgtttagtcttatttcttttgctattgggaagttgtgggggacgctattttgcagctttttcatcctcagttctgacctcctcatgtgctttacagatgcccccaaaggtcagcattcatccacctttcactgagagtgtttggccatctctaaagcagaggtattttaacagctctccttaatggatgtcctgtggtttcaggcctcagacaggctgcccttgggccctcagcagaagtcgggaatcgtcttatacttccagatcgtcttttactcaggcaaaatatgagatgctgtgtcagggtttcccaagggaagaaactgagtgggaggtgcaggtaaaccccacagtacaaaataaaacagagctgtgagtagttgaaaggactgtgttttgacagcgtaataaggtaattgtttaaaaccatggctaattcatcagatgtcatgtgtcttttatagttaaaagatgaaatttctttacccactggtgtcaacaacagaaagattctaaaactttcaaaaaatgtgccagtcctggctgctttgtttcatgttctttgacaactttcaaaatgtaaattgagattcatgcaactattaatggaaatataaatatcatggcttcataaggataaaattagaggagctcaacataacggctcattttaatgatttctaaggggtttccatgcccaggctaataactgtacatttagcaataagcaaatctcaaagcctatttcttatctttccctagaattacagcttttaagcccaagctggtcgttccttttataccactccactcacttgataggggtgacatgggctgagctttctctcctatcagggctcaaagacaagtttagcagcgtttctaaacttctgtcaatcagctcacaggacacagaccagtttcgttatcccattaacagatttacatttctgttctctggaagtgtcagttaatgtccttaaaggtaatatacacaaatgtacacaatagtctctgaatttttctcagaagacacactcagaaaccttagaattctgattcattctctttggctcagacttggatgaatttgcttctcagagtagggacatgaaaattattcttaatttatacttcatgtaatctgtttcttctttctccctccgccgccctccaatagctcttctgagcttgtttgttcttcccctaactcccattgttgaaaacatggcctcccctcattctcacctttccaggaatctccttgtgctcctcaagttcggctcatcgcaaacttggagttctgttttctcatgcccttctttcattttcttcttttaagagacaggatcttgctctgtctccaagattggagtgcagtggtacgattctagctcactgcagcctcaaactgctgggcttaagtgatcctcccaactcagcctcccaagaagctaggaccactgctgtgtgtcaccacaccagctaattattttatcttttctagagacaaggtctcactctgttgcccaggctggtcttgaactcctagcctcaagcaatcttcctacctcagcttcccaaagcactgggaggtgccactcttcttgtgttttttacctttgcatttatttcctggttacaatacttttaacttaatggctgctgaactagattctgccaatgtacgtgccgtccaggacacgttcatgccactttaattttcttagaacatcaatgagatagtcttactagggagagataaagggcaggggtttggttttctggcaggttttctttcattttaataacgagccaacccacggaggaaggaattgattgatggctgcttcctcttttgtaaagaacaaacatcaaattagtggtttgtcctcactttgcggataagcagaataataacacctgtgcctctccctgcattattttgaaactaatataattttgtttggacagaacgtagatagcaaccttaatggggaggaatgtggaagaggaattactgaagggggaccagtcagcctgtcaggcagcaactctggtgccaaagaatggacataggatcagagctgtggacccccgtcctgtttgtaaacttcctgagggtggcagagattcataccctttctcccatcaggacaaaaatcagtgtgttggagctcactcaggaaatgctctttgggattggcatgggaaggggatgaggccgattgacaattagcctagttcactgggattttgttgtaggagctgggtggtggcaccatatggccaacaggggatgccagcgacatccctaatttctctggcttcctgataggtcctggtagggtcggggttccaccgggatttgcctagtatggtctacctctgactgaaattaaactctaagtaggtaactggggaacgcctttctccagagagaaggttttgatgtgatctcatcatcggggactggattggacctggagaaatcagtttttctatagtcttgtttctagagtggcaccctggtcttgggcaggtcagaaggacagatagttggtcaccatcttcaacacaaatcatggctggaaaagggccccagtagggagtgcctttctcactcaccaatcaccaaggctagaagatagtctgcagattctttcagatgccacaaagctgtgattacagctgcccattggcaaatcaggtactagtttttgttaatcacattgcagtcttccttcactgtttcttcccctggtcccggaattaaggctgggctccatttgacaagttatcttctgtgcaggtagagcagcaggctgtgttagctcacagcatctactcagtaggcatggaaatatccactgaatgggactgagaaagtggaatgggaggggaacgtgtgaagaacaggaagtttgcctctttatgtccaaagtctgtctacttagagcaacaggatggtgatgatgctttctggttaaagatgtcatggcaacagtcttccctagacagctctctagcaatagccagtggcatgtaaaccctgcatttttgcactgtatccagtgtttgcaactcccttgtagaactttccctgaagtcagcaagaaccctgtgagaatcaggatttgtctagaaatttagcatttacctaatcaatgattctctagacatgtcagtacctccaagtgattcatatgcatgtttggtgggcgtcgagcatgtggcagtttggagaaggaagtggagaatgcagcagcagcaggagaaatgtttgatgttgctaaacatcaaccccacagcaagcctagaactcggggaatgggaggcatggtgcgggtagctgctgacacacagctctagagatagctgcctgcaaagctggatgggactccaggcaataggcttcagggcctaactgctctttcaaggtcactgattgttacaggagccatggtctgcagcattgagcatggaattattattactattaagcatgatcctcaccgtgatgctcttggggtggaacaaaagagcccagagagaatatgcttattttatgcaacctctaacgtttcctcccagagttgtgatgaaactgaaccaaactctagcatgagaatcggcatcccaggccagcagccaaaacaagtggtgacacttggccaggcacggtggctcatgcctgtaatccctgcactttgggaggccgaggcgggtggatcacaaggtcaggagtttgaaaccagcctggccaacatagtgaaaccccatctctactaaaaatacaaaaaattagctgggcgtggtggcgggcacctgtaatcccagctacttgggaggctggggcaggagaatcgcttgaacttggaggtggaggttgcagtgagccaagatcgcgccactgcactccagtccagtgacagtgtgagactctgtctcaaaaaaaaagtgccgatactttatatatcttctgaaagaaatgaagtctgtaagaaggactgttaaccctcagaatggtctggggatgctacatccccttgtggacttgtcacactggtatgagtgtagggagtgggaacacttcttctcagctccttcctcaccatgtgtcattcagggacaaagggagcaggatatcttccctttgaaaaatctcatatgcctggcaatactcgtcaccctgtgaataatgttgatgcattcacctaaccagtattataagcccctgctgtgtgtcagacactatgcttggtgctgaaatagacaaggaggggactgcctgtcttggaaggcaaatcccagtctcctaagagacactagaaccacaggcaaccatgctgatctatgcaatgacatgtaatgcaactttgtcctgcaaccaccttgagatctttgaaagttctcctacctccaaaactcagacaagtcctctctcttgccaagtgcctaaagcaaggatatgtttatagaggcagctgggggcatctggccaatttatttcccagcagacctgctgcttcccctgattccaatactttcttccccaacccaaaccaaggcgtctggcaatgttaaaaacatcaagaatgataaaacaagcattttaatgaagattattgatgtattcattggctgtttctttaaatgggtagagaactaataaaggatctaccccaaataaccaaaaatatcagcctcagcaccagcagaaattggaagcgttctggtatttatatgtgtttttctcagctggcagatttgttttaggaaactatttgcaaagcctgggaaaaatgtgctttctctgtctgttaaaggaacatgcaggttggttggtgctggttctccatctgacagttctgtctggtggcctcaaaaaaaaagaaaaatacagcatagtccagatttggactatgcaaatggtgtcttgaaacttaacttttaggtcttgagcaaagccaagtattattgaaatgtttattttgtttttatctgcaggaggttttcattcaaaatgtggtgctttgggggaaaaggaagggtgtttgtactaggtactttttagcattcttcttattatctgacctatcacagcctcttcaggagacattaattaatttagttcatataatcaacactggaaccaaggaaaaattatttatacttttagaaattctcatgttcttatacttctttggagattgaattgactccaaagagactattttgtgattaagaatatttttgtggccgggcacggtggctcacgcctgtaatcccagcactttgggaggccaaggcaggtggatcacctgaggccaggagttcaagactagtctggacaacttggcaaaaccctgtctttactaaaaatactaaacttagccagccgtggtgacgggcgcctgtagtcccagctactcgggaggctgaggcaggagaatcacttgaacccgagaggtggaggttgcagtgggccgagatcacagcattccactccagcctgggaagaatatttttgtgtggggagtcgttatattatgtccttagaccaggaggtccaattgaggcagaaatttttgaagtaaaaccattttttttgaaggaaacacatatttaaatatcaaagaacactggacgtatacttttaaaaatttacatacttgtgttagttatctattgctgtataacaaaacctttgcagctcaaaacaacagtcattatctcacaagtttatgtaggttacgcaggtgcagctgacctgcttggtctgagctttcgaaaagtgcagtgaggatgtcagcctaggctgccgtcacctcaagggtcccctgggggtggatccacttccaagctcactcatgtggctgttggcaggatgcagttgctcacgggttgttaggctgagggcgtcggttcctcactaagccagaggcttccttaagttccttaacatgttttctcatggggggcagctcacagtgtagcaattggcttcgtcaaaacaagcaagcgggagggtaagagacagaaagcaagacagaggccagggtctttcacagcctaatctcaagagcagtacctcatcacttttgtcctattttgacaaacgtcgtattgacttttgtcactacatcagaagcgagtcactaggtctagcccacactcaaagggagaggatttcacagagcaagaatatcaggaagcagaatcattggttatttcattagaagctgctggcacagttcttaatgaagctacaaaacattgaactgggaggaatatgggggtaggagggtgacagggagggcaggttaattttgtggatgctgaggacaacgtgcctcatgaaaagtgttcccatcagactggtgtatttctgtttcttttcttttttttttttttttttttttttttttttgagacagagtctcgctctgtcaccaggctggagtgcagtggcacaatctcagctcactgcaacctccgccttcctggtacaagcgattcccctgccttagcctcctgaatagctgggattacaggcatgtgccaccacgcccagcttattttttgtattttagtagagactgggtttcaccttgttggccaggatggtctcagtctcctgaccctgtgatctacccaccttggcctcccaaagtgctgggattacaggcatgagccaccgtgcccagcccagaatggtgtatttctaggacatctgcaatgcatcactctctaataaaagaaaaaaaaatagccactccttgacagatactcaaaggtgtggagtcccttactaaaccacactccaaagaaataagcctgcaaaatagggaaaagttgttttttacctagaaagcagattctctgcattttcttattttcaaatagtggggagaaaccctaagctgtacatatgaaggaatggattcatttctcctcttgcacagcaccccagcaccttgtacaccctattcctccctaactcccaaccgcacactcacctcccaagcatctgcagatctacatacatattatcaaatgtacagagtactgagtgaaatggtcactgtagctatggaaaggtgagatttgcaggctgtctgaaatgtttcttgctaaagtagttccaatccttcccccatttagaaaaaaatacattcttagtaaatgactttcaggcagaaaaagaaaaccacactggaaataggattctaataaaccaacatggggctctagctggtgaacatatttctgagccatccctatacagaaaccacaagacaaataagaaaaagtaaatccagatcacttagacccttcaaaccacatcctgggttccaaggacagtggctgcgagttaggaaagatacatttatccagtggaccttttgactgtcttgtcaatcttaagaaaaaaatgtagagtaaaaaattttggctgggcgtggtggctcacgcctgtaatcccagcactttgggagaccgaggcgggcggatcacgaggtcaggagattgagaccatcctggctaacacagtgaaaccccgtctctactaaaaatacaaaaaaaactagccaggcgtggtagcaggcgcctgtaatcccagctactccggaggctgaggcaggagaatagcgtgaacccaggaggcagagcttgcagcgaggcgagattgcaccactgcactccagcctgggctacagagcgagactctgtctcaaaaaaaaaaaaaaaagaaaaaatttggtttgggtcccttcccaccttcccttgcttcatcactttccttaagcctctaagcatccagatcttccccaaagcagtgcttcctagtcagtgattaccctatcctctttttattccttttcttcatgcacaccttcagtccataaatccaagctttttgtaaggagggagggtgagtaaaccaattcatactaaggtgagagtgaattatatataaacctcttaatatattaaatctaccaagcagtgtttcagaaggaaatctgctaacatgggcatcttacttgaaaaaaatttcagttggttcaacaaagtatggtttagaaatcattttcaatcaggatcggggagagaatttttttttttcttaaagcagttaggtttccccagcagatttcgaatgcttggatatttgtgattcttttctatgggaatctgatctggataagacctaagaccataaacactctagctttccctttgggtctttgctattgaaaactagttggacttaaacaagtgaagtgggttttaaggatggctcctttcacccatttctaaaagatagcattcttgagggtctgctttatttagcagaaggaatgctggttttccaatctctcactcaaaaggaacttttacttatctcatagaaaagaatgggatggagattaatgtaatagaaaaggtattctacaaatatcatagcagctatatttaatcaattcatgttcaaagatcaattagtagtaataagagttgtgctgtataaaatcaccatatctcatattcaaattgcagatcatcagttgaaaaagcatggattgttttctcactgaaagaaatctttaaaagtggtaccataagagacattaagactggctattgttttatttctctctctctctctttctctttctctctttctgtcatttgatttctgactttcagtggatttttttaacattacaaaatcatagagaaagaatattggaccatttattgtagagtttttaaacaatttgataccattttttttttctggcgtcttaactgcatttgctgtttgtgaggggtgtagaggtccctgatgttcagagtacagtaccagcgtttatgtgaaatattgcagcctggcctgtggaggacaggggttactaaggggcaagctgctgcttgcgataacacccccagtgcctccttctaatcttgcgccatttcccagggcagacagccttgtggggctctgactggtgccctggaacatgttttaccttccatttttcttgctctgatttctgaagacagaatgttctcttcaacctacacatcaggagttttccttctgttttcctttttcactggttcctttgtgaatttgcacttttatctaacctaaaacattggaaacaggaataaacacaaataatggcatgaggccgtggccacagaatgacaagacaggacacagcaaatgttttgggtttttttcacatttatgaaccttctcattctatttatttatttatttacttacttatttcttgagacagggtctcattctgtcacccaggctggagtgcagtggcatgatcatagctcactgcagccttgaactcctggactcaagtgatcttccagcctcagccttctgagtagctgggattacaggcatacaccaccatgcctggctaataaaaaaaaaattctgttgtacagatggggtctcactatgttccccaggctaggctagtctcgaactcctggcctcaaacagtcctcctgccttgacctcccaaagtgctgggattataggcctgagccactgtgctcaactgcttcccattctaaaaagtgtctaaggcagttatagaggttatataacaaggtataaaatttctgagtgaaaggaaaataaggagagagaaataaatctaagtgtgtgtaaggttaatatgtacacagaatgtttattaaggcctttgacagttcctttaaaaattacctgcaggccaggtgcggtggctcatgcctgtaatcccaacagtttgggaggccgaggtgggcggatcacttgaggtcaggagttcaagacaaacctggccaacatggtgaaaccctgtctctactaaaaatacaaaaattagccaggtgtggtggcatgtgcctgtagtcccagctacttgggaggctgaggcaggagaatcgcttgagcccagaaagtggaggttgcagtgaactgagatcacgccattgcactccagcctgggtgacagagggagactccatctcaaagagaaacaaacaacaacaacaacaaaacctgcaaatttgagctgcctagcagccaagcaataaagggaatcacaatgaacgataagattcatatatctgccaatttaaaaacaaaccagttctcttgggtcagtgcttctcaaacttgaatgtacatttgagacacctggtgcattgttaaaatgtaggttctcatctagcaggtccatggtgcatttctaactggctcccaggcaatgctatgctgatgctgatgctgacgctgacgttgatgctgctactcattggactgccctttgagtagtaaaattttagctcactcagaaaaacctcatagtttatttggagtaacatccctttagcccttgtagatattataagactacattacaataaagttctggtgagtctaattgttgaccagagagattgtttacttcagagcacctggatttgaattgcagtgtgccacctgctgctgtgttacctggtacaagttaatgcattctcttcacacctcagttttatcatcttctgaatgaggctaatagtagtacctgtcatagatgcttgtaacagtgcctgcatagagtaagaatgaaataatgttagctattttttattgttacatttaaaatagattttgctggtagtgaaatatgaatgataaaatcatctcctcagctgttttccttgcataagtaccttaaaataatgtatttgcaatttccttctgaatccttgaataaaagacaccagataatcagaagatgttactgacattagtaggcatttgaagttcactctgatgggatcagtctatttacaacaaattgctatagagagtaaaaagcgccaaccttttcctgtagtttttgaatgacagcatctttgttcatgcagttggctttgctgcatttccacttcatcaattttttggctctgtctttgcaaaaaaaaaaaaaaaaaaaaattacagagggagaattttaaaacacaaatgaagaaaaagaaattactttgaaattgccaaaattgtttggctgaaagagcttatttagaaaaacagagctttttatgtataaacctgtttcattggtgttgtatcagaattgcatgttgctagtagtttactatcaaaacaacacttgtgtttcaagctgttaaaaaatgaataaaataggccaagtatggtggctcacacctgtaatcccaacattttgggaggccgaggcgggcggatcacttgaggtcaggagttcgacaccagcctggccaacatggtgaaaccccatctctactaaaaatacaaaaattagccgggcctggtagcatgctcctgtagtcccagctactcaggaggccgaggcaggagaattgcttgatcttgggcagtggaggttgcagttagctgagatcatgccactgcactccagcctgggcaacagagcaagactccatctcaaaatttaaaaaaaaaaaaaaagaataaaatagaaacactgatttttctggtattttatacccttccccgaatatccatacccaaggcatttttaagatttccctaagctggaagcaccagaccacatgttatttaaaacatattaagatgtacctactgtattatgtatactttgtatatcattttataacagtctgcaaagtagcaggaaaaaatttttgccttcaggttaaactcagaagagttgccattggctaactgaaaaattttgcatttggtaagcatttaattaaaaatttattgatttcggttttgaggttttacttttcatatttttagagccaataacttctggaatctcagacatttttgtggaatcttaagttgttcatagatcctaggtgctgtgtttgtcatcctgagagcttaaatggccctgtccaaacctcagcctcagctcagagtaggaaattgtcaagcacttggtaactggtaagcaaatggattttagtcactaaatggagcgggaggaatggagtgctccctcaaaaagagcatttcagctggtcacagtggcttgggcttgtaatcctagcactttaggaggcccaggcatgaggaccacttgagcccaggagttcgagaccagcctgggtaacacaggaagatttcacctctacaaaaagtaaaactaaaaaattagccaggcattgtggtgccttgaatctgtagtcctagaaacttaggaggctgaagcagaggatcgcttgagcccagaaagttgaggctgcagtaagctgtgatcacgccacagcactccagcccaagcaacagagcatagactccatctccaaaaaaagaggctgtgacagaggaaggcagggggatgttaatcagagagacatagagactgggagagtctgaaagagaggcagagagacttacacaaattaaagacacagactgagagaaatggaaaaatgaagagaggatcccagacagattgattgacttcccaggtaacatataatatcttacaatcctgcagaatgtttaaagttgcattttaaaaggcactccgtttgttcacacaatcctggtaagaagatcatcttaattagtatcatactttgcagctttcaagcagttcttaggcatcattgcgtttaagacctggctccagccgttttattacagatgaggagattgacttgttcaccttacatttgtagagcattttgcaatttttttgaaggacatttccacccattatctaatcacaagtctccataaatcccatctcccctggtataaaagcagcttaaattacaggtgctactaagatgcaaaatgcagcccacaaaatcagcaaatattttttctttgtttcctccttttttaaaaaaggcgtagatttcatattactactttgtttcaggccgtatattgaagtaacaaaaataaaaccaaaattgacaccaattttatttcgaaataaaatctacttttttcactttcccacatcattttctagctgctaaccttcatgcatattcaatttttgcatatttacagccctgtcaaagataaaattttattttctgcattttcactcaacattatacactgagtattggccatttcactcatctcagtgccactttcaaagagatacccaggaaaagcagcagcaagggttgttcgaccttgaacaactacagataatactttggctctctttgagatttttaaggccctgtaagtaaaatattttcagattacagaaggcttgggattctgtctttatcacatgactgattggtcctccatgttctccttggcagatgtgggtatcagtgacacaatgttttttactcaaaacatggtttagcttaccagtaccaggaatggccgatgcatacgcattctcattgtgaaggtttatttgcacctccactcttcttaaccaggctattttcacagaagaaataaccccaacttcatgaaccctattcccatgacctatttgccaatctgttaaaataatggccaactcaaatgatcagtaatgattgactcaccatgacatcatccatcacctttgtcactggaagcccacttgccttaaagggtgcagcatcttccaactttgctccagcaacttcagctcctcattaaatccctccctgtaggtcatccctgcaaccagttgacactggagctcagcagccagctgataggggccttcactcctcttgtcgagctgctcctctctcctctcaaagccctctttccttctctcctgctggctgacctagaagctcagctaaagaggtgttcaaagggtccagtcgcttaaacaggtggccagtgtgctttctgctataactccttgctccttgagctcagctccaagctgtagaaggccatggaagagcacattgatgtcatcttgggaataattaacagggtccggtttttctgttcgtttccttgcaccagatgaagagtaggataaacttgggagaagccaaagtgatgtttttgtattgtggctttgaatgatttcaaggtcccttggttaacctattctcagcaaaagaaatagaagatggtcccaagatggtaagagcagagtgtttggttgataatttgatctaaaagtgaccagactccacaagttaacccccagagctgctcaattacagcagtttaaaaataagttgaggattcgttgctaaatcagtggaaagaatttggagtttccaaaatagtttgtaatcaagaaaagccatctgaggaggccctggagggaaaatcgctgatgattatcaaatgtccagttctcaatgcggtggtatatgtgactgaaaaaaaccacttttgtccacatttggggaaagataagattatactaaatgcctggcacatacactggaccttcagttacctagaaaactttcaaaataactttgccataacaagtggcaaattattaaggtcatgggctgtcttctcaaaattacttagataacatgattctctggccagtatgagacccttaatttatcacgtatgaagcatatgagcctgtttatccgttcgttaatcattatttttatctggcttgggctctgggttactggccatgcaggcagatcttcccttccaaaaggaaacgttattattctcttgtattcgtttctttaaaaacatgcagatttaacaaaacatattacttagcactcttactgatttagaaatatgatgacccttaggaaatgcatctccttaaaagaaattccaggcaaactcatttaacctttctggatgttagtttcctgaccttcaaaaaatgggatgttggaccaaattatcttgaagtttccttccagctgtgtgctcggtggggagtgctggcagtgtggggcaggacactgaatatctgtggtggtgatgtttggatacaggggtgagcaacccctttggaagcaacatgcaaaattgctgagcagtggtgggggtgcatgggaatgggtggcggtgcccctgtattggagtgtaagagacaagtgtggtgagagcagtctggcagggctactactgttatgatttacacagtccctttcatccagctacttcaaagcaccttcacaaactctggctcattattccttcaaacacagcattcaagaaagattgataggcgccttttaattaattcaaagatgatgaagctgagcattacagaatataaggggattcttccaaaagtatctgcactgcagaggggcatgatatataaagtgttcatcacaggtttctaactgaaacaaggaaatgacctgaacgcttatttttagaggagaccagtatatattatggcatattcagaatatgcaataccatgcacccattaaaatcatgtttattaagaatagtcacattagggaaatggtcataactgaacaacgtttagtggcataaaaaaagataaagctttgtacatacagtatgatgaaaatgtttaatgtggctgggcatagtgacttgtgcctgtaattccagcactgtgggaggccaaggcaggagtatcactgaaggccaggagttcaagaccagcctgggcaccatggtgagaccctgtctctacaaaaaatttaaaaattagccaggtggtcatgatgcatgcctactattctagctactagggaggctgaggctggaggatcactggagcccaggaggtcaaggctgcagtatgccatgatcataccactgtactccagcctgggcaacagagtgagatcctgtctcaaaaattgaaaaaaaaaaaaaaaaaaggtttaatgtgtagaagggaaaaggctaaatggaaatgtgttaaagtcttaacggtgatcttccttggagcaatgatatagtgggtggttgctattcttttctttatacttttatgtacttttatgttatgcaaggttgaaaaaatgggcacatattgctttcatagtcatttctgttaagataatcatatgattatgaaagagggagtgtgtgtgtgaaagtggaatggaccaatcaaatagaacagtaggaagacctcagaagatatgacacatgagctcaaccccaaagatgagaagaaccagccatttagtgaatggggaagccctctggggaacagaaggcacgaaggaaggaataagtttggaatgttctaggttttgaaaaaaggccagcatgggagaatgatgaaagataaggtcagagccattgccaagggcaaggtcatgtaggacccatgacgaaaagtttgggaaacccttgtaggggactgacataatttattttacatttttgaaaaatccttctgaccaatatatgaggaacattgtaagaggcaagtgtagaagtcaagatctattgagaaggcgttgcaggggtccaggtgagaatgaggatggttcagagtggagagacagggacaaggtaagttggagtgtgggtctgacttgttagccatgtggaggaaataattatcataataactatcatgtatgtttttagggggctctataacttcagtatgttttcagtgttcacatttgtaggtttacagagtttgtacttgataaggtacagaagtaagtcacttctcaaaaatcatgcctttagaagcatatatcatgcttctattatagtaatgataataatagaagtctactgctagtcataaaacttatctgttcagagaaggctttttttttttttcagagaagtcttccaggtttcagctgttgctcattaatgctcaccacagccctttgaggtcgatgcaattatgctttggaaaagctaagtaacttgccaaaggccatgcagctaaaagaagcaaaagctggattcaaatctcagctctctgcctccagagagaacaccctcaatcccgcttaacagacattagctctgcttatttgattggtggcagtggagatgaacagaagtgaacagtgagcagagaggggtctgtaccccacacacatccctgcaccccaactgtcaactgtcttccatcatcatttactatatccacgtccactcctgacagcatcagtggctcagtcttaccgacctgcatcagggttttgggctctgcctctgtttagacagagcacgatttgggaagtgctgctaagtcagccagtggctgagtagaaacagccctgcagtgggcctctgcctgctctgtggctcgtttatcatgtgtctcatctttaaaagttggggctcagtctaggtgcctcctggcctgagcaccccagaattctatgctgatcccttcattgtgacatggcctgtcatctactcttctgggaagaccatctgcacctcactgatacttgaagctcattgagtattgtcacatatcagcccagaaagtcacagggtacagcaactcatacttgctcccagcaccaggccagccccattctgcctccagggagtcacccaaaatagagagatgagggtaaaataagacctaggaatactatttatttgcctccatggcctttgaacttgcacatccaacgtaacggctcctgtgtgttcttgattgttccaattatcatttttcctctcgaatacctgagagcattcattattttgcaagagatttgagaatccctgtgccctaacttttctttccttgatgtgggatgttcttctgtgactaggtaagtttatctcaatgtgtccccaaataatttctcagaatgttaaattcataaaagctaccatgaaaggataaataaatgaaaggagttctgaggtcaaaacatttggggaaagaagagtctttctccttctgaggcattctcagtgcacagtaacctgtttatctcgctttgccttgctctttcccaagcacatttttgctcaacgccccctaccttccccatacacttgttaacactttgcagagcactagggctctgtgggacaggctgggaaatgcaggttgacatgccactgttaatacctagaaaattaaggcaaacttgtccctgagagatgtcaggatagcacagtatggaaaggccatgcttatcagggctcttatctgagagaatacagtggttatgagcatgactctggaactagacagtctgggttgaattccccgctctgccatttagttatatgatatggggtgtattacctaacatctctgtatctcatttgttcctcacttgtgacatggggatgatgacaatgataatagtaccaacctataggatagctatgagaattaaacaaattagtaaatatgaagtatttggaacattggcctgactcaggataagtcctgtttaaatgttagtatcattattattgtttcttcaagccaggaatatacttcatcaattatgtgtacactcattccttcattcaacaaacacttacttaatactcctgtgtcctaggcactgttctagtgctggagatacatcagtgaatcaaaaacatgagagaaaaatccctgtccttgtggaacttacactgtagtggaatctactactaataatgcaaatagaaagaaaaatatatgcaagttacccaggcactgggtagcctagtacctgtcctatagttgtcaaatggatggatatattattcttattgttgttgtcgtttacagtaattgagcttggaggtttgagctgccatcttagataagaacagaaagctaagccaatacgagtgccatgccagtaagaaaaggaaactattacataaagattaggaagaaaaaagagaagaatgacaagtaggccattatctatggccatgagttttatttaaaatgagctggaccttttttgccttctttatctgtgtatcagatagacaattacctctaggcagatttccacattccaagacatgaagactttctaagctgcagcagacacatctttacttgtagcaaaacagagagcgatgggggttattttcagatgactgtagctgaagaggaagaatcaagtaattcactccccccaataataattcacttctgagaggaaaaacttctttggaaaaagcaccccatgaatggaagtctcagcatttgctgaagaacttagttaaaataaactctagacctttttcattgattctttatctcttcttttccagaaaccttctctatgtctacccacagaggctgaactttgtaaacaaactagcatcagcccggaacattacaataaagatccagtttatgtgtggagaagatgctagcaatgcgatgccggtaaggagggaaacgaacatttgcctcaaatcagggtgggctgctcacccctgtcacttcacacaagtccgggactcatcagtgtacaaagtccgtctattccaggccaatactgctcagcatgtgcaagggcttctgtgcccaggatatcagtggggaaacagggtcagtcttacttgacgatctctttctcggcttattctgtagtgagcttggaacatacagatcattttagaggattaaaaaaagtcataaagtctttccatactgcccataggaccaccccactctaaaggcatacaaagtaaagagatggctcaacacgtgcgccatgtttgctgagtgtcttccatgcacaaactgtacacactgtgttatacacacacagtgttacacacttactcaagcctcggaccacagtgctgatgaatacaaagtaccgcctagtaattataaacacacaccacctccacaccttctaggagtggatctttgttctgaggcaaaatataaatcaaattattcatatatatatatatatataaaatgcagtgtgctccaaggaactcaaaatgccagaatttatactttttaaaccatctcctactaaatgagatggtggttagctattactatttcccataagtcatagaattcagttaatataactttctttctttttttcttttttttttttttttttgagacagagtttcactctttttgcccaggctggagtacaatggccgcaacctccacctcccaagttcaagtgattctcctgcctcagccttccaagtagctgggattacaggcgcgtgccaccacgcccagctaattttgtatttttagtagagatggggtttcaccatgttggccagggtggtctcaaactcctgacctcagctgatccacccgccttggcctcctaaagtgctgggactaaaggcgtgagccactgcacgcagttaatatacctttctaaaaagaaaaagaaaaaaatcctttctcttaatgtcccacccaaagaaaaaaagaaaaaaaaaaacctttctcctaacgtcccacctgtcttcccaatgcaaggtgtcttaagacagcggtggggtcctcttagtcctctctgctcaggcccctggcatgccactgccaggagtgccagatatgcttgtgcagatcctgtggcaaccaagatgcccagccaagagtgactgtgggctaaagtccagtctgttcttcattcactgagccatgggttctggtgttgggattactgcatctagaggaaagagctttttttctctgcacaaaggtgagtgcacttgttcataatgcatcctaaatgctgcttcaggcccaaggaggtatctttttctaaatggcacaaatgtggataaggcagtggagattcaaatcacctaagtgagtaggtctgtatgtttgagagagaagaacctggaactggggatttctcactcaagacaaaagtatgtaactttggcctgttggatagacctctaggcagtgaggcagagtggagagagtactggttttctaatctcacaaacatgtggcctttggtcactaatatagccccttggaacctcatttcacccttcatagccagttcctttgcactggtgtgcttgggccagttgtagtcccagcacttttttttttctttttgagacaggatctcactcttgcccaggctggggtgcaatggtgcaatctcgactcactgcaacctctgcttcctaggctcaagcgatcctcttgcctccgccccctgagtagcagggactatacgcatgtgccaccacgcctggctaatttttgtatttttttgtagagatgaggtttcgccatgttgcccaggctggtctccaactcctgggctcaagccattctcccacgccgacctcccagagtgctgagattacaggtgtgagccactgctcctggccaacccagcactcttaattgtacaaaatgcagctctatgagaccagaacatcctgttggcctgatgatagtcaatttgatgtacccaaatgttactgataatttgatcctttctctactggtgaacaggtcatctttggaaaatccagcgggcctgaatttctgcaggaagtgtacacagctgttacataccataataagtaagtctatttcagcattctaaatatatgccaagatggtttcatcatctcctggtttttccaagtcccgtgggtggttcctcctaactatttttataattcagggactgaggggcaaaggaaatccatgccagttccgtgactctgtgttgaagatgtataactttgccattaaccaagactgagagaagaacgtgtcttcaagaatccaatatagttttgacttttccagaagcttctattctagtatgatgcaaagaggttgtattacgttaattaaggaaacacatttcctaacttgctttgagaccctggaggggaccagaagcacagtccggctccccttgccctgtgtgtccctgtccgctccacttgacacctgccccactgtctgcctaggctgaccaaaggagaaatggaacactcattattccaccggcaaatggagtcatgggataatgcccaccctattattcatgttccacagggaagggagagacacctgcacagtgttggacggaattgggtttgatccgggcctgataacctgggcctaattaagtccttcatttaagcacattctgggattgggatgaggattaagtgaggtaatgtacattacatacctacattactttacaatgtacgtaatgtacttcgtaattaatgaagaacctagggcttcataatgcagttaaattggttcctttttcctcctgcctcattcatttgcttctactctttgatgagtgcagctaggtgctaggcttggttccttgggtagaaatggaaaaaggaggtcacagcaggagtccaaacctcatcctttcttcaaattaagttgttggagttttccattgtgtgggggagttgttttttgttttttgttttttgttttttgtttttcctgacaaagcctttagttcatgaacagttttatgtaagggaagtgcatctaataacataagcttggtctcagggacttccagcttcagagcagagtaatgtaaaatgaaaagcaaaacaccaggcaaattctgaggagcaaaggggctgtggcgttttacaatcagagaagtcatcattcttgctaaaagttatttgtgtataatgtgcttttgaaacaggtctcctgacttttatgaagaagtgaaaattaagctccccgctaagctcacagtaaatcaccacctcctgttcaccttctaccatatcagctgtcagcagaagcaaggagcctccgtggaaactctcctgggatattcagtgagttgtttccagcctgctgactcacactgcagttgttggtgcatctgaggtccctgcagagataaacaaccaaattctattcacttgattttttccagtcagaagtagcaaaacatgctaagccacattatagcaagaggcagaaatgatttgccttagcaaatgtcaaatttcaggaatggaaagctagcgggtgatagatgttggaagaatactcatctgttttttaaaaagcattgcagtgttcactatttccaaatttaatatccatgcttcacgtatagaactagctttgtcccccaagaagaaaccattttttctttaaaagatataaaaggtgaaataaacattgatgttgttcagacacacacaaacattggctacagagaaaaatgctactgctttagctccaaaagcaataaatcatcaatattaccatttcaggaggtctcggagatttaaaatgcaaagaactggacagaaattactgccaaaaagagtactggtcaatatctactcactgtttagttgcatttgattattgcgagctagataaattatcagaattatatgctgtaataaataccactttattatttacatcatctgtttcagtggctgccaattctcttaaatgaacgtcttcaaactggatcctactgtctcccagttgccttggaaaaattgccacccaactactccatgcattctgctgaggtaattggcaagctggccatcagctgtttcttgtccagctgtagtcttggaccaccttcccagactcactttccattcccatgtggccatggatgttcatcatgttctcagagagcacattgttctgataggatgggaggaataactgactgtgaaacctcattcttttaaatgccaccaaatcagaatgttcagtagacgcaacctacacccaaggcagcataaccttgcattatctaccacagagggattcccagaataatgtattatagaagaggaggcaaactaaggccattcatagtaaacaactgttcccatcaaggatccttataaaagattcccaggccagattcatccgtttctttcttgggtcagttgtcacagccctccggtagataccaaggtatttattctcctaccaatcccaatgccaatagcctttcccacttcctgtttctggcactttctcttgctcatccactctgctgcagtgcacccatttaaagagaagcccaggtggatcaactgaggtcaggatttcaagaccagcctggccaaggtggcaaaaccccatctctactaaaaatacaaaaattagctgggcctgctgttgggtgcctgtaatcccagcactttgggaggccgaggcaggcagatcacttgaggtgagaagttcaagaccagcctggccaacatggtgaaactccatctctactaaaaatacaaaaaaattagccgggcgtggtggcgggtgcctgtaatcccagctactcgggaggctgaggcaggagaatcgctttaacctgggaagtggaggttgcagtgagctgagatcacaccactgcactgcagcctgggtgacagagtgagactccatctcaaaataaataaataaaaaataaataaagggagcccaggggactgtccaccctgactgcaccagctgtcacactgctagcccacttctcagttccttgcataggtttacatcaataagtattattttgaagtaaatctcggacatcatatttcattttagtctgcatcttaaaagataagggatttgtttttaaccatcacaataccattgtcatactttaaaattttaactgtaatttcttagtatcatcaaatattcagtcactgatcaaatttttaattatcccactaatgctatatttttgacgcttgctttttaaaattggtattcagataaggtccacacactgatattgattgttacatctctggagacgcttttaatctacagatcctccatctcttttgctttccttgcaattttaagttgaagaatttctcagaaatttgaatttaatttcaaccgttccagtcaactttcttctctgttctttcgccatctaccgtctcacttccggctgttttcctcttattttcttttttccttaaagagagaaccaacttttgccctggaccacaggcatgtgtctggtaaaccaaaacttctctcatcaaagccatctaaggggcaatccgagtatgtccacagacatttccctgattggtctttatgatttggacatcaacacctttcagtatccctcaaaaccaccttcttatcatcaagttgcacactctaatttcttagaaccccctattatctttttaagctataggaaagacctgagtgttggagagagacaaatctgtgtccaaagtctagattctgccactccctagctgtgtgaatgttggtgagttgcttaccctctctgagtctcgaagatgaaactgagcccatatctgcatatctgcctataaggttgctgtaagcattaaatgagataatgcttgccaaacaacaaactcaattcctaagtaaacattaattcctttttcttacttgcgctatgctgtgtttatagatatacccttagcctctcttagtatcctttaaacctgcactgtctgataagatagccactagctgtatgtggctattgaggaaaatatggctagttcaaactgagatatgtgctataagtaaaatatgcaacagatttcaaaaacttcatggggaaaaatgtgaaatattgtattaataattttttacattgattacatattgaaacagtctttaggctgtattgagttaaatgaaatattactttcacatggtccttttgtgtttttttttttttttttttttttttagagacagggtcttgctctgtcactcaggctggagtgcagtggcgtgatcacagctcactgtaatcttgaactcataggctcaagcagtcgtctcacctcggcctccttagtagctgggactataggcatgcaccaccacgcccagctaattttttttttttttttcattagaaacagtgtcttgctatgctgctcaggctggtctcaaactcctggcctcatgtgatcctcccactttggactcccaaagtcctgggattataggtgtgagccaccatgcccggcccctttttacttttttaatgtggccactagatgattttaaattacatatatagctcacgttatatttccactggacagtgctattttagatcacagatggcaaactcaagtgcccacaggatccagatgagtaacataaatgaatgccttgttctggtggcatctgttcactctggagattgtctcttccccatctgaaggtcacagctgttctcttcactctgcagattggtgacatgctgggatataaggccaattttttcatttcttccagtactcaaatgaagttagaaaagcagtcttttataggaaattttcaggctttcaaatattggtaattaattttttaaagttcctaatacttcaaacagaacgtgtgtgtaggctagagcccactttgggccccagcttttgactgcttcagatagctttaaaggtctccatcccctgtacacatctacctttcattatgatgaaagacatacaaacctaggcgaggccctcactcaacactgcaggacatctctaaaggaatgcaatttcaatgggaatttaaggcaagaaactgtctgtaagacctacgaaggtaatgatatataaacgtataaaagagtcactttgagtaattaaagcaggagccgacctggcctagaaacatgtgggaaacacttggaaaaactgtggtgaaagggaaagtaatatcgggtactcaaaagtattaaaatttcatgtcttgtaaagatattctatactttgtcctgacaattctgattaatggggaaattgctgggatcttaatttattttaattcctagaatccagaatcatcaatgctggtttggaacttagagacagattacaccgttcagccctcttctcacagcatgagaacagaacactaaggcccagaaagtttagttgagtcgtctaagtaaaaataactagtttgaagcggggcacagtggctcacacctgtaatcccaacattttgggaggctgaagtgggcagatcacttgagcccagaagtttgagaccagcttgggcaacatggtgaaaccacatttctacaaaaaatagaaaaattagttgggtgtggtggtgtgtgcctgtagtccccgctactccagagactgagacgggaggatcatttgagcccaggaggtcgaggctgcagtgaaccgtgattgcaccactgcacttcagcctggcgacagagtgggaccctgtctcaaaaggaatgaataaatacataaatattaactagtttggtgtagaattgaagttgaatccagggctcctgactccaagaacagttagattagttttcaagagagttctgtatttgtataaccctgacatttccagtcaagttggtctgcattgcttgttagtaatcagaaaagggaattggattgctaatcttttttttttctctttaacacagaaagtcccattacagaatcctcccattaagtgggctgaaggacataagggagtatttaatattgaagtgcaagctgtttcttctgtacacacccaggtaaggaatgtcaaggttaatcatgaaggtaaaggtgcagcggaggagcctttgaaggacaggccaataaaagatcagtgaaaatccttgtctacagataaataaaaaataaccctttagttctttgtggggacatgcaaacctctttaggtttcatttgtcattggaatagaaagaccttacaaaaccgccgagcacctaaaggaaagaacctagtatctgcactgttggtggagaaactttgcagggggacttgatttgaaactctcatctgctgttacttcttttccctctgtaactctgccactttgccagcttttaaaaagaaattccgtactctctcctttacctgccactgtctgagttctgcatctgctgagacctctctcttggcagtatgcttacctggtacgctgacctctgcttacagaacatgtcagagccaaaattatttcttctttagctaataattattgaaacgttcaacttcatgcaccacattctacaaagaagttcatagcctcggtctgaaacatcatgtcttagaccttctggtctgaaacgctggataagaggttctacccataaagagctattcgattgtgtttgtgaatccactggtgaacattgatggtataaaaccccatgaggcctgccttctcccttcgcaggacaaccacctggagaagttcttcaccctctgccactccctggagagccaggtgaccttccccatccgcgtgctggatcagaaaatcagcgagatggcgctggagcatgagctgaagctcagcatcatctgcctgaactcctcccgcctggagccgctcgtgctcttcctgcacctggtgctggacaagctcttccagctgtccgtgcagcccatggtcatcgctggccagacaggtatgaacctgcagggctgggctgggaggaggcaggagcaagcaagcattgccttctttaatgaaaaatgactttccagaaatccagagacaatgtgatcttcctttccactgatgatgtgtgctcaagggaggccaagtcttatgctattttttttttgagactctctgcatgttggaaagaaaaagaaacattaaaatagggttcttaatattatagctttttgtaaactttattaaatgattataggcagtctttaaaattccatttctggtaattgatgaatttattttaccttgaagatatttttgttttcttgactaacaggaaatggaacattttaaggtaagacaacctgtgttaaatggagggaaggaactctctacattgaaatgcaatgcaatcaatttttaaagttaaaacataaactcactattttaaagtgtatagttcattggtttttagtatagtcacaaggttgtgcaatgatcgctacaatctagttttataacattttcatcacctccaaataaaaccccatcactccctattcatccctccccctagaactcatccgttctctcttacagtctattttaaatgcttacttttaacaagttaacactaaatacaatgtgtacattttcccttagaaataatctcaaaagcttatcctggaggcatgaccagagtccagtggttctcctaactcttccagggtagactggctggtatagggcatctttatttgccaccattttcagctgtgcctatatagctctttgctttccagtccagcagacgtcttttgggtaccatccatatgcccagtactgtactaaaagttgtaggctttgtgacaataaccaagagcatctcagacctcagaggacttataatatggcaaagagtcagcagcacaggacaagactcctcaaagggacacagctaaattttgcagtggttgtggggagggtggtatcaaaggagagagtgagaaaacatccatctgggaggatgcaggaggtccacataaagagatggccttgaagaagggatagagtgaaaaccgacagaataggggcaatgagatgagtgcagcactgcagagaaccagaaaagtgtgggagtgtcaggaagaaagtcagtagcacagttggtggtggaacagaagcacgtgtggaagtgggctgggacaatgaagtgagacggcttttagagccagggaggggcatgtccccttaatctctcactctgctttgcaccctgatatgcatcttctgtggttccacagatcaaacgtcctgtgttggaggctaacttttcatccatgtagcagttgcctctccagctagattcttgcagagctctgccctccttcgattactttctgtgcccccgcatatgtggcacactgctttgtatgttccagctagttaatacagacttgttcaccagacaaaaatatttatatgttttgagcagcttctccatagcaagttgccaccttgtggtgtgaggaccacagggtgttggcataggcagaataagtggaggtggctagtctacaagcatttattcagaacctattctgtgtctctgcaatggaaagcacagtgggggcacaaaagatgtgagaaatgcacttcgcatgggaaggattccagctttcacagacagacagtttaccaccagacatggctggagaatcatgtaactcagtttcacttgagccctgtactgtgtggagtcagacggcttcatggaggaggtgggacttgtgctgagattcacagggtcggtatgattttgtggatgggagtgaggagggcttcctaggcgaggacaacagcatgagcaaagtctcagaggtaagagagcaggcatgatgggacaatacaatgactgcctcattttaagggatgtcgaactgagccaaaaagggtacaaggttagataagtatattggagccaaactatagaggcttagggcaccagaacaagaggttctatgcagtaaatcaaatgtgtatgggcccactgtgggaatgacttgatatgcagacatttttaggttaatctgtacaagaatcagggttgtgcagcacatctcaaatcatagtgtccacaacagtcacgtgagcatcttgtaaagatgcagaacctgattaatacactctctggggtggggcctgagattctgcatttcttagtagcaagcaggtgatagtggtcgtgtgtgtccgcagcccccactgagtagcatcagtttacaacctggcttagagaaggaggacgtctggacagtcttatgtctttgtcattaaaaaccatcaatgctattcagtggcaggaggaggaagttcaaaagagggaatgtggaggcatctgtggtactcagagccagcatgccagagctcaccaaaaccatctacccttcccaggcctagttaaattggtcagcggtcaggactcattgtcactgtcctggagaaacttccacctcaggctccttaaggaccagctgtgggactacccatttttctcttggttcctcagccaacttctcccagtttgccttcgagtccgtggtggccatcgccaacagtctgcacaacagcaaggacctgagcaaggaccagcatgggaggaactgcctgctggcttcctacgtgcactacgtcttccgcctgccagaggtgcaaagggatgtgcccaagtcaggtagagttgccctgagtgtgggactctggtgggcggggcaacaccacctccaccccactgcagtgtaatccaaaataaaacatcctatgctgggtgcaggggctcacatctgcaaccccagcactctaggaggctgagatggcaggatcgcttggagcagtggctcacatctgcaaccccagcactctaggaggctgagatggcaggatcgcttggagcagtggctcacatctgcaaccccagcactctaggaggctgagatggcaggatcgcttggagcagtggctcacatctgcaaccccagcactctaggaggctgagatggcaggatcgcttggagcagtggctcacatctgcaaccccagcactctaggaggctgagatggcaggatcgcttggagcagtggctcacatctgcaaccccagcactctaggaggctgagatggcaggatcgcttggagcagtggctcacatctgcaaccccagcactctaggaggctgagatggcaggatcgcttggagcagtggctcacatctgcaaccccagcactctaggaggctgagatggcaggatcacttggagcagtggctcacatctgcaaccccagcactctaggaggctgagatggcaggatcgcttggagcagtggctcacatctgcaaccccagcactctaggaggctgagatggcaggatcgcttggagcagtggctcacatctgcaaccccagcactctaggaggctgagatggcaggatcgcttggagcagtggctcacatctgcaaccccagcactctaggaggctgagatggcaggatcgcttggagcagtggctcacatctgcaaccccagcactctaggaggctgagatggcaggatcgcttggagcagtggctcacatctgcaaccccagcactctaggaggctgagatggcaggatcgcttggagccagaagttggagaccagcccagggaacataatgagactctgtctctacaaaaaatataaaaattagcagagcatggtggcacatacctttagtcccagctactcaggaagaagctgaggcaggaggatcatttaagcccaggagttggaggctgcagtgagctatgattgcaccactgcactccagcctgggaaacagagcgagatcccatctcttaaaacaaacaaacaaacaaacaaacaccctaaaattccattttcgttttcaggacaatacaaaacttacatgaatgctgaaattatgtgtttctttatagatctttcttcctccctccttgcctctttttatgctctaaacacttattttgtctgcccatttgataatccctcactggtctttacccacttgctaatttatgattcagctgagaatctcttttttaagatggagaagtggtgactgatgcctacgattctagtataataaaggaaataatatatatccaatggcagtggttcttaaactttttgttattaaaaaaaatcccttttcacatttccctcaaactgaactattgaaataatagtaatgcatttccccaactcttcttaattatttacataagtaataatcaagtagaacttcttgtcagcatgatataaaaattagtgtcagtgagttcacaaaattgcaggcccaaataaacatgacacttttgttggtctgtgcagcctcatttctagtaaatctgaaaatttgattgagtttttaaaaatactagtgatgtggctgggtgcggtggttcatgcctgtaatcaatcctagcactttgggaggccaaggtgagcagatcacttgagctcaggagttcaagaccagcctaggcaacgtgacaaaagcccatttctataaaaattacaaaaattagccagtcgtggtggcgggtgcctgtagtcccagctactcgggaagctgaggcaagaggattgcttgaacctgggaggcggaggttgcagtgagctgagatcatgccactgcactccagcctggaggacaaagtgagaccctgtcttaaaaaaaaaaaaaattaaatagtaatatctcatagatttccataaccgcttgtgaaaacatgtcaacatttaaagatgaaaaacagtgctgtatacatcatataccgtaatcctcacaaggttcagatgactctatggatttttgaatctgagaaaacctcactgcatgaattgtaaagttgtcatttaaatattgacaaattaaaaatatccacatttttagcttctcatgagaaatcagaagctctagcaaccctggggtccatttcccgatggcagtaatagactggagccagtagtaccccctgcctttgtaagaggcatgtgttggctgtttaccatgatctccaccactccctggtgccttatgccccatctacttctctccaaaagattgcctcctaccccaaccaggatttgttaagaagtctctaattccaaggcctaatccggtggcttttcatccaccctatccctcttcaattccttcttaaactcagtaagtaactctgttcccctgtctgttgacatgtctctgcctggtggggtgcaggcgctcccactgccctcctagaccctcggagctaccacacgtatggccgcacatcagctgctgctgtgagttcaaagctgctgcaggcccgggtgatgagcagcagtaacccagacctcgcggggacacactccgcagcagacgaggaagtgaagaacatcatgtcttcaaaggtaggaaagatgtcaaaccgtggaaggggacacaggcttttttattttttaactaaaacttggagaagtaacacagaagcaaccactactgctgcccaccatgctggtcggatgctttaatgctcagctttggagtgattaacgttctttagaacagattaagaccattctgacagatgcagcagcaagaccagcatctgaggatttgctgagaactacttagcttgggtagcaaagttttaaagcatcaggggtttagccacatggagtcatgtggctaaaccatgcattttattttcaaggaaaaaaaatagctttaacttttgatacctggaaaggttgcctttaatttagttttgtttctttaatacctacctcttacgttcattaacatccacagattgattatctcacaaaaaagtccaaaggaacagccgggcatggtggctcatgcctgtaatcctagcactttgggaggccgaggcgggcggattacttgaggccaagagttcaagaccagcctggccaacatggtgaaaccctgtctctactaaaaataaaaacattggccaagcacggtggctcacacctgtaatctcagcactttgggaggccgaggtgggtggatcacaaggtcaggagttcgagaccagcctggctgacatggtgaaaccccgtctctactaaaaatacaaaattagccaggcgtggtggcacatgcctgtaatcccagctattcaggaagctgaggcaggagaatcgcttcaacccaggaggcagaggttgcagtgagccaagattgtgccatttcactctagcctgggcaacaagagcaaaactctgtctcaaaaaaagatacaaaacattagttgggcatggtggcgggtccctgtaattctagctactcaggaggctgaggcaggagaatcacgtgaacacgggaggtggaggttgcagtgagccgagattgcaccactgcactccagcttgagctacaagagtgagactccgtctcaaaaaaaaaaaaaaaaaaaaaaaaatcccaaggagcaatgccaaattttacaagcatataaaaactgacatcctgagagggttgatggcttgccctatgttgtttttccctctatgaattctttatttttttcatggtaaagctttactttcagaacagttttagagttacggaattatatactctatacccagtctctcctttattaacattttacattcaaatggtacttttggcacaattagtgaaccaatattcatggaatattattcattaagttcatctttattcacaccttctcagtttttctctaatgtcctttttctgtcccaggatcccattctgaatgccatattacattttgcagtcttgcctccataggctcctcttgctggaaacaatttcttagactttctttgttcttcatgaccttgacagttttgaggagtaatggtcaagtattttgtagattgtctctcattaggaattttttaaagattatgatattattcacataccataaaattcacccttttttaaaagatggagtatacgatccaacagtctttaatctactcacaaagctaccacgatgaattcttagcctgaattttttctccaatgatctgtggcctcagggtggccgagctattagagtaatatcatttcccctgataaagagaaatcaaaatctctaggtttagacacagacacagtttcacccttacaaattccagccacttgacactgtgtggtgtgaggaaggaaatctgcaggccagggtttggggctgggcgccaatactgccccgctgtgtggccatgggaaagtcatgtaactgtgctgggcctcatgtcctcatctctgcagaggtcctggtccctgaatgaacttaagaaccatctaccctgggtcttttaaaaacactggatttggccgggcaccgtggctcatgccagtaatcccagcactttcggaggctgaggcgggcagatcacgaggtcaggagatcgagaccatcctggctaacacggtgaaaccccgtctctactaaaaatacaaaaaattagccgggcgtggtggcgggcgcctgtaatcccagctactcaggaggctgaggcaggagaatggcgtgaacccgggaggcggagcttgcagtaagccaagatcgtgccaccgcactccagcctgggcagcagagcgagactacgtctaaaaaaataaaaataaataaaaaataaatgaaaaaaccactggattcaccccctgagatgctgatgatctgtagtttgagccatcaggaattattcgtattctatcctttttgacttacaaaaatcagttcagggatgtgctggagtgagctcatacctgttcccaaaagctgattgcttagttttccagaattttttgagccagttttgaaacagacattgttaaaattaaatcgtataaacttaaaattaaataagttatattaaaaacaaaggtaatctgaatgcaatgtggtatgctagattgtatcctggaacagaaataggacatgagtgcaaaaactggtgaaatccgagtcgttcgtgtttagttaatagtaacatatcaatgttagtttcttagttttgacaaatgtaccttactataaaagatattaagagaaatgcaatgaaagtcatataagaaatactacctttgtaacttctctgtaaatctaataataactatacaacttatacttcaaaattaaaagttcactttaaaaaggtaaacctagtcccttcctaataatttcactatatgctacaatatctaagttcttccttctttacgtttactgtgtctgtgtgatggaaatattatataatggtttgctaccacactgcatttctatgacatcgtgttggtagattgaaatcagttatgatgaaagtatttgtggcacaaaaattggcaaatgctacaaattacccctacccccctgacaactggttgttaaacatttgccagcacaacacaactcagcctcatattgaaagcccctttcagtaataccactttctgatcacccaggaaagaagtggtctgcagctattactgacagccttgatctttctatttttctttaataaaatgaaaatattaaatttttatgtggacagggttagcaattttcgaattattttgttgcatggggagaaaatgtctgatagagcatgagcactccacttcccttcagaggtagtttttgacaatgtattggtgtttaggagacagcgtggtgcagtaccgtactaaaccacagagagacactgttcccacacattttttcctggcgtcccctgaagtcacagactcctagaagggactactcagcagcccagattcttaaatagtttttaactgtaggttgctacacacaaactattaacgggtgttgtctcaagagcaagtaaaattaggtataacttcactgtctttgctttgttttatatttacttatggcaattgttttacctttgtaaccaggaaaaaaaatatgtataaaaaaatgaattctgaggttgtgatttccagatgtctggcttacctttccatggttggttgactgttaagccatggtttgtgtattttagatcgccgatcgcaactgcagccgaatgtcttactattgctctggcagtagtgatgctccaagttcacctgcagccccaaggccagccagcaaaaaggtactgaagagagcaatgtgaggttcatcccaggataagaacagaaggatttcctcatgccctcacactgtgcttgggaatagtcaaagtgctcccctgcctgtccctgatgtgctaacacacacacaccccacacacacttttgcagccctgtcctttacgccacatttgaccacctaattgcccattaactcagtgtttctcccactttctcatgcatcagaattacctggaagccttgttaaaactcatcgctggaccctacctcctgagtttctgattcaatagatctgagctggaggctcaagaatttgcatttctaacaagttcccagctgatgctggtccagggaccacattttgagaaccactgcattggcctccttttagtagagggaaagctgggcacaagtcatccttgacaaaagtgaatggcaataattaggtatcatttgtttcaataccatataaactaatatgaaatgcttcctcataattcttcacaatcagccttacctatgagttcagaaactttaaaagctgttaaactgcttaccaggatttttaaagcaacaaaattccccaatcatagtcccagcctatgtggtctgagggatggagggaaaaaaaactgtctgccctaatttcctctcttctaggcactcaagaatctcaccattatagtagctacttaagtttttaatgtctttgaagacctgtattaaaatgtaaatatggcagggcacagtggttcatacctgtattcccagcactttcggaggccgaggtgggtggatcacctgaggtcaggagttcaagataagcctggccaacatggtgaaaccccctcctactaaagatacaaaaactagccgggcatgatggcaggcacctgtaatctcagctactcaggaggctgaggcaggagaatcacttgaacacgggaggcagaggctgcagtgagctgagatcgtgccactgcactccagcctgggcgacagaatgagactccatttcaaaaaaaaaaaaaaagaaaaaaagggtaaatatgcttattgcaaaggataacacaggaagccatttgcaagagctgacatcacagggaaatgtttattaaacaggcaaggagggaatgagcctccccaagtctccctttggactggatgagggaaagaccaagtgtgggagggccggggcctggtgctgtgcactttgcagtattccaggcaccatatgtctagtgagaggtaccaggatttaactataaaaggaaaagtgaaaaaagatatggttaggctaaaaacaaattagtccacttgctctaaaatttaatattaggctatcacaggccctatgcagtgactggttataggtattataccattttcctttcttaaaaaccattatttgcctacagcctgacttctttaacccatgtcctgtttggtttcgcagttgccatgttttgacttgaaatgaccagaatagagacattttatttcaaagggaagtttggccaatatgtttccttaataccttagcagacagagttttgctgcttggctattttatataacctccagagcaaggtgttcttgtaataatgctgcccagaaagcagcatgaattactttaagaagcagcttatccttgtctaatctcttcttgccataagaccctggcagacaaactgacctattttctagaggcgacctttgaagctgggggagcatgtctttcctacaatgagaagatcaaggtgtagtccagttataatatgtgcacagttagaccacctgctagactaaaactcaaccccacgcctctctcaagtgagacagcttcacttcagactcacaacagcaaacaaatgtgttaacgcatattaaaattattaaggtttgactaacctcacaaaacgaagtgaaaccagtcgataagctgaaacacctaagcattctccattcctcaccactaacccgcctgggatctaattggttaaaatacccaagcatgtatacagagattttccttttgtcatcttttagtttagctaagtagctctcaaattttaatgtacgcaagaattagtacattgggttgcatgcgtactggactctgtgggtaatttttttttttttttgaaacagagtctcacttactctgtcacccaggctggagtgccgtggtgcaatcttggctcactgcaacctctgcctcccaggtttaagtgattctcctgcctcagcctccagagtagctgggattacaaccgtgaaccaccacatctggctaatttttgtatttttagtatagatggggtttcaccatgttgaccaggctcgtctcaaactcctgacctcaagtaatctgcctcctcggcctcccaaagtgctaggattacaggcatgagtcaacacacctagccctctgtggataatttaaacgactgtcaagagcaatgtttgctgtaatcagtttttgctttaggtgttgactttaaaacttaatttgcaaataaggatatgatattagggtgttcaaatagctttagctttcttacctactttcttaccagaaaaaaaaaatgagtttatctacgtttattccaggttttgtgggcataagatgaaagaaaaccacagaaaattcccagacatcatttttggcattaattagggtgaccaactgttctcatttgcccaggactgagggagtccccaagatgtaaggttttctattttaggaccaggacattatcaggcacactgtaatggattgattgccctacctttagtcttgaacttcttcctcatcaaaatgattgtcaggaatatgaacacatagccagatatgctgtagaatggaaaaggtataagtcaccctgtgcactatttgctactgagcagtaggtgacttgaagggaagtgaagacgcaaagtggagctgggggactttccaagcatctggccctgggacatagacatttagatgttgtaagttaaggctgatactactatgcctttcagagcccaagatcctctcataaaccccaccgatcctgcttcccacaatgccatatgggcattataaaaacaaaaattgtccagtctcctagagagtttagacaccatctagacagtggtccctaaagtgtaaccctggaccagcagcagcagcagcagcagcagcagcacccaggaacttgttagaaatgcaaattcccaggctattgaatcagaatatctgggggtggggccccccagtctgtgtttcatcaggccctgcaggagattctgatacacagaggccgggcgtagtggctcacacccgtaatcccagcactttgggaggccaaggcgggtggattgcttgagctcaggagtttgagactaagtgggcagcatggcgaaaccccatctctaccaaaaaaaaagaaaaaagaaaaaactagctgggcttggtggtgcacgcctttagtcccagctacttgggactaaagtaggtgggaggattgcttgagccagggaagttgcagtgagcgagattacgccaccgcattccagcctgggcgacagagtgcagccctatctcaaaaaaaaaaaaagtttgagaactgctgccaccaaccaactgattttatggatgagaaaactgagggtgaagagaggaatggcttgcacatggtcacacagagagttttcagcaggacccaagaggaaagtaagacagtaccagttttaatggctacccagaatgtttcccccgtagaatagagtttcactcccaggctgagtccactccctcagatgtgtctgtcctgtgcagcactgaccccagccttctatgcaccgaaatgtcctccagtctcaggtgatctcagcactgactttgccatccaccacttactgcctagaacatctaagacacatgcttcaggaacgaacaagctattaaattggggggaataaaagaaaagaaaaaaagtgttggtgaataataatagcctttgtttcacagcctaatttttgtggttcttatttagcatttccatgaggagcttgcccttcagatggtggtcagcaccggaatggtgagagaaacagtcttcaagtatgcctggttcttctttgagcttctggtgagattcttgcgcgtttgtatctgtgctcaataggccaagagaagcacacagcagaaaggaattgacattttgttcactgagttgcccctgctgaaaacctggggtggtttcttgaaatctaataatctctcacccctcccatccttcttccactaaattgtgttgcttctaccatgaaaatctatcgccgtcctgtgagttctcatcaccttcaccactctccacctggccacacaccatcatctctcatgtgcctctcgcagtgacatcctctttttcctgcctgtatccatttttgctcttggcccacccattctgcacatggcagccaatactaaacagagaatgtcacgctccttttaaaaaccgatcgatgattttcactgcactgagaagaaagcacaaatttttatcatgacctaaaaagcccttgtatgattctgttgttttcctccctctctaacctcatctcacgccacattcccccatcattcagccacatggtcctcttttggtgctttgaagatgccaaggccattttggcctcacagccttttccagattctcttcctgctccctaactttcacctccgcacccccaacacacacagtttctattcttctctgtagatttcagcttcagtggaaccatccccaagaggccttttctgaccacctaatactgtaatatatcttcctctattatcctccttctgagcaccctatttatttctttcctagtggttatcacaatttctaattgttttttctgtctcagcggttagattttcaggatttgggtctctcttgtgtattatcccatctctagcctcagcacactgcttggtaccatgcaaggcccaattaatatctgttggaaaacagaatgaaatttgtatatctgtttatcctaaaacttctaccattactcgagcagaaaagcaaaaggtatagccataataccttaattttaaaataaggggaataatagtgataactatttttttgtttaattattaatggaagcaaaaggattttcccatagaggcactaaaaataaacattttctcaatgttgataaacagagatgcataatgagatgatgttgaatgaaagaggtctaaagacatagacaccaactatataaaaatatatatgcaaacagttcagaggatttggagtaggttgagatttagtgataatgttagctttatattcattgggttctttcccctgtcccattaagtgaatctttttttttttttttttttttttaaagagagtctaggctgggtgtggtggctcacacttgtaatcctagcactttgggaggctgaggcaggcaggtcacttgaagtcaagagttcgagaccagcctggccaacgtgacaaaacccatccctactaaaaatacaaaaattagccgggtgtggtggcgggtgcctgtaatcccatctactcaggaggctgaggcaggagaattgcttgaacctgggaggcagaggcagcagtgagctgagattgcgccattgcactgcagcctgggcaaaaagagcaaaactccatctaaaaaaaaaaaaaaaagagagagggactaaagagatgggaggggttccacctaagctctagtttttgtatgtaagttgaagcccaagaaaaagggagaaatgctgaacaataggacacagagaacaaagggcaaaggaaacaaatgaaccatccactggggaggaaataggaagcaatgtggaatagagttcagaagaagtcaggttcatgccacagaaacacacccaggattcaaatcccatgaagttttgcaaagtcccaacctctgttttgagaagggtcccaaagcatggtcccaaatccttgccacagaaccacctggaggtgcttagtaaaaataaagcagagattctttctcaaagcactaaaattaggaggctggaggccagcattgtgcatttacctgtcttctcaggtgacttctaagcctgttaatgatccactggtctacaccacctctgttctgtgaatcctatacagagctacaggtcttttggaatttgtactcagacaacaccagaatttttttttcattccaaaagccgagctaattaaggtggtggctgcagctcacaagtcttggggcaagagcattaacaatgagacatgagctccatgctctggcaggaaagggactgggccataagacccattcccctcttgtttcttgaggcatgagaagtatcaaaaccgtcaccccatgccctttatatcctgcttctatttacacatcccacccaccatcatgtctctccataaagaagattcactcagcctagctctgcaaaaatgaaaaaattacctgggtgtggtaacatgtgcttgtagtctcagttactcagcaggctgaggcaggagcgtcactggagcctaggagttcaaggctgcagtgagccttgatcatgccattgcactccagcctgggcaacagattgagaccctgtctcaaaaaaaaaaaaaaaaaaaaaaaaaaaaagaagaagaagaagaagattcacttgagtcataatccagctatggataattcatacaaataattcattcccaatgcggaattcagcattgcttattctgagtggttccatgtggcatcttagagctctctttccaaaggaagtttgcattctctgcaggtgtaatgatgtctctgttcttcacagaatcccaataatagttggcataccaatagttggcataccaatgggagaaagaataatcacatcaaaactactgagcatcttactatatatgtgccaggcagtgttttaagcattttaaagcatcatctaatgtaatcattatgcaatcttgaggcaggaggaacttttattatcccaaatttacagatggggttggaggaagggtggtggccataaagagagtctccaagtcagccaaatgcttcagcagtaccacttcactgcccctaactgcttttggccttgcacatttatttactagggcttcgttggcccaggagagaaagcataagctaaagcacatggcccatcttacctctaggaagtcccttatggtaaacagatgaagttttttgggaagaaagcccctgctgatctaagcatattgcaggggtttgtcaacatgcagatcacccaagacaccagttctaccagcagcctaaaacctaagtctgtcaggttctggcaggacagagtttccgttgcccaaaagggttaactgaaaagcattgatcaaaaggactctgctcagcatgtatgggaggttcaggggccaatgaggattggtgagagcccccagggtacagcagctggcagaagcctttctctatgctagctctaaagaatcaagagtatagcagagtaactggggcctagaaaaatctggaggcagatgagacaatcttagaaaaggagcctggggccttagaaaaatgttgccactaccaggacctcactgcagcagggatgagggcagtggaagtgagtaactacctgggcctctctgttctcccacgtaatgatccccttgtttgtgctcctgttggccaactccaactggaagccaaaggttaagggggcctgagtgatgtggtccctcgagacccccttcccagcattcagagacagacagagaaggacaagaaatccatcagggagctggggtaggggcaaatggaaactatcatcccccagccagaactttgcaaggaaattgatctcagactcagacaaggtgcccaattcttcatacattgtttatgcatttgcctgaccaatgcccaggaagttatttgaaaaccaaaacagttttgttttgtttttttccaagaagcttgagaaagacaacagcttccttggccttagccaacaacctgggcaatttaacaccctctagttgtgtcagtgcccaagcgctaatgaacaaccactttggcattagagctgttaaacacaatgcttgggcgactttcacacttgctaatgaataaaatccctgtgcttctagaaactgctgagccagaccttggagaaatagagataaatgggtgacctagtttactcactcaggacatgaagttccacattaaggggttctttagaggtacccttactttaaatgggccacaaaggcccatatagggggaaagatttctgtgcctcgccccactcaacagggccaggcctccactagtgtttctactggatgttcttctctggagatctggaggacacagtagctggcaagctgctgacagtctggaaagaggccattggttggaagtatggtattgtgagaattatgtatttggttgtaggatggccaaactcagcagacaggagccaaatacagcagtgagttctgaaagccttagtgctgggatggttagcctgcccagaatcaggattggcattgcccaaaacaaagaggccttatcttcttaagtcctttgttaggagcatagtgagagagaggcttttttcggacaaaaatgggtccagttcccacccttcattcgggtcttctcaccaggtgcatgcggccttgtgggatatgaagccatctctgtgtcccaaaccaaagaggatgccgccatgaggagaaaccatggtttctctactgagctttagggtttgatgtccttaggtcttccctgagctggccatggcgttgtctgaaaacatgaaacacataaagcctgtgtctctggttttttcttattttgccttccctttgttttttctgtttgtttccatgctaacaaaaattgccagtgctgcatgcatccttagaaactgaattctgctgttagtgtattaacgttctctcatgtagctcctgggagtggaagtcccctcttcttccagtctcaacacagagggcaaatgtgggtggttcaacttccagtgccattagtagtagtagtagtagtagtagtagtagtagtattgcagtggctgtctgactaatctagacgcatacatgaaaacgttttcagagtgtagggacccaaccacaagaccttctagtcttccccatgttcctaatagtgtaagcaacttccaacaaggataagactcaccctcagatggtgacaagggggcccatattgacctgtgaatctcctggccccaagaagatgtccaaaaaataagcatgatcttgatttaaaattgtggtaggcattgagatagtattattctagtcataatgcagacagtcaccaattgacacaaggatatctatatatagatacgatatgtatatgtatgtatatccatatagatatatctgtatataaatatctttctgtcagttgacgaattgtttgcattatatatgtaaccacagtatacaccagtttgtgtcaattggtgacttgtattgacacaaagatatctatatagagatactagatatagatagataatctgtatatagatatttttgtgtcatttggtgactgtctgcattatgtaactaaaaattagacttatggaactcaaaatttcccctagaggtaatgttttccctggaggcaatgttctaaatagtggttctgtttccagctggccaacatttcctgctcaatatataatatagctaaaatttataggagcagaagataactgctggaaactatagaactgtttctggaaaaactgtgctccctcgagaaacactgaaactcaagataggaggaacatttctcccacgttctccttactgtagtttcaggaacagaaaagactttagttcgcatcaagaaccttgtgataaactgttcctttctgagtcatgtgttctgtcctatgatagaggacacctagctggttacaggagcccagctcaggtctgccttccaggatgtaggcagttgagaacactgtagctaaagaattaagctcctggctttgtcagcagcaagaagggagcctctgacttggggtcaaaaagaggacacccttcccacctcccgccaccatggtaaccattggtgtgtctgcagcattttagtccagagcttgctcgggcaccaccagcacagataaagtgtcagaaaatccattgttagagagcatttctgtgagtctttcccccttttctgcattgtacaagcaggtcaccaatctccatgttgacatttcctccatccccctccgcaggtgaaaagcatggcccagcacgtacataacatggacaaacgggacagttttcggaggactcgtttttctgaccgtttcatggatgacataactactattgttaatgtggtcacctcggaaattgcagcccttttagtaaaaccacagaaggtaactgtattttactctttattttctaaattgtttacctggaacatatattactttcataatcagagaaaaataagcatcattttaaaacaataattaaaatataactgtaatgacagttaaacgcagtatgttatactggactggaccctgatgtggggctggaaaattgttataaacaaattacacacatgaggccaggggttcgagacctgcctggccaacatggtgacatggtgagaccctgtctctactaaaaatataaaaattagctgagcatggttgtgcatatctgtaatcccagcaactgggaggcagaagcaagagaactgcttgaacctgggagacagaggttgcagtgagccgagatggtgccacagcactccagcctgggtgacagagtgagactctgtctcaaaaaaaaaaaaaaaaagaaattgcaatatggactgtggtttaaatgatcatatcaggctgggtgcagtggctcacacctgtaatcccagcactttgggaggcaagggtggtcagatcacttgaggtcaggcattcgagaccagcctggccaacatgttgaaaccccgtctctactaaaaatatggaaaattagccgggtgtagtggcacgtacctgtaatcccagcttctcgggaggctgaggtggaagaatcgcttgagcccaggaggcggaggttgcagtgagccgagatggtaccacagcactccagcctgggtgacagagtgagactccatctaaaagaaaaatgtagatatgaaagataatatttttgctcttaggaaatacaccttgaagtgttatggggtaaatgggcatgatatttgcaacccattctcaaatggttcagaaaaaaatgtttttatgttcatagaatgataaaacaaatgtagcaaaatgtcaagtattgataagcttcgttaaagggtatacagtagttctttgtactattcttgcaccttttctgtaagtttaaaattgtttcagaataaaagctaaaacatatataaaatggaataaatcaaatgtttaaaaggcagctacaaaaatcttaggaagcaatgtttattattaatcgctttgtcgttattgagaatgtgcatagtaccaagtgctcaggagattttcattcggttattcctcatggcaaactttgttggaacagcatggtatctccacattggcaggtgtgagaataaggcacagtgaggttgataaattttccaaaagtcacacacagccagcagtaaagccaagactggagattttagacccagatactgagtcacgtaaggcacccaggaggagtggccatgtggagaatgcggagagagttcgaggacctctcagcggcacggtagcaacctctttatcaggtccccatccatcccagtgacttgactggtcagcatggcctgaatttgcaaattgcatgttaacaaaagcaaaatagtttcaaaccatatttttaatagtgtcaaaggaaattgatttgtcattctgagaataaaggacataaacatgaaaaactgaatcccagattgctctgaagcactgtaaaatccctcataaacaggagcactgagaaataatacaaattaaaaattttaaaaataggcgtagcttattaattgggattcatggaggaatttaccctacggagtgaatacaccctgcggagtatgactctgacctctcttaggctggaaatgctgcctaattgaggaataaatttcttaggtaaaaactaattcttttatcctgattggattttctgtaataatccttaaaaattaagaaactgtctcattgaaaacagtaagtatttttcaagtcagtttgccaaaaaaaaagaaaatagttacaaaaaaaaaagttaccaggatataaaaaaaagtaggatccaacatagtatatagagaatgaggttaattatacacatataaatatgcatgtagaaaaaaaagtgactggaaggaaatgcacctaaatattaacagtgcacgaataattacttgattcaacctcacagtcatggctttagttaaaggagactcaactacttcgcccagtgccacccagaaggacagtggctgaaataataggacctgtctctcccaatgttcccaccagtgacctggaagttcaaatccagagtgtcccacaaaatgatttgggtgtttgtttgtttttaaggaaaatgaacaggcggaaaagatgaacatcagcctggctttcttcttgtatgaccttctctccctcatggatcggggctttgtgtttaacctcatcagacattattgcagccaggtgagtgtcccccccacccccacccccgagcgagccacttggttccttctcatataatgtgatgttcgttgccatggcacgctgtcttcttcattactgagttggcatgaatcctacacatcctgtgttttgcagcacgtccctcatgtctgtgccatggacattcctcagacatgctggtttaccttgattcctggagcatttaccgacagtgtagaagggtcaacagattcatctgtgggaattaaaatttgtgatatgatctgaatcttcaatttgacattcaacagaaaattaacatggctatacagtgctttcagtctttgacaagtccttgcgctcccagtctgaggtctcttttcacatattagggtaattaattaaattgctgttgtgatgctccgacttgaaagaacctttttaaagtgttcttaaataaaatcattcaaagagatttaatttcactgagcacatagcaaatatttcataaaccaagtgcatctatcagtgccatccccccagatttttaaatggaattattcatgtgctgtctccctcaaactaccttaacaatagtaatataaatagcagttattgttgctgctcctctccttccatatccctaatctagccactagtaccatcattactgctactactaccaccagccaccaccattctcattagtcccatgcccactatcaccaccttctccaccatcaccacctcccaccacctccaccacctccaccatcaccaccacctccaccatcaccaccaccacctccaccatcaccacctccttcaccatcaccatcaccaccacctccaccatcaccaccaccacctccaccaccaccagcatcttcaccatcaccaccacctccaccatcaccaccaccaccacctccaccatcaccacctccttcaccatcaccatcaccaccacctccactatcaccaccacctccaccatcaccaccacctccaccatcaccaccacctccaccatcaccaccacttccttcaccaccaccaccatcttcaccgtcaccaccacctccaccaccaccacctcctccaccaccaccacctcctccaccatcaccacctccttcaccatcaccatcaccaccacctccaccatcaccaccaccacctccaccatcaccaccacctccaccaccaccagcatcttcaccatcaccaccacccacctccttcaccatcaccaccacctccaccatcaccaccaccacctccaccatcaccaccacctccaccaccaccagcatcttcaccatcaccaccaccacctccaccatcaccaccacctccaccatcaccaccaccacctccaccaccatcaccaccacctccaccatcaccaccacctccaccaccaccagcatcttcaccatcaccaccacctccaccaccaccaccacctccaccatcaccaccaccacctccaccaccaccagcatcttcaccatcaccaccacctccaccaccaccaccacctccaccatcaccaccacctccaccatcaccaccacctccaccatcaccatcaccaccacctccaccatcaccacctcctccaccatcaccaccacctccaccaccaccacctcccccactaccaacagctccttcaccatcaccacaacatccaccaccaccatcaccaccaccaccaccacctcctccaccatcaccacctcctccaccaccaccaccattagctccaccatgaccacctccttcacctccaccatcacttcttccaccatcatcattgtcaccatcatcaccaccaccacctccaccaccatcaccacctctcccatcaccaccacgttctctgtggttagtcacttagtgactttagataagtttttccaattttatgggtcttaatttcctcagttttaaaataagaagggggggttgagagatttgagggctgatcaacgaaaaggataggaccataaaaagcagtgacatacaagcttcattgagcagcacttggacagggttacataagagcggaagcccctcccagcatgagaacagccataggcctgcagtgaggaggggaccatccagaggagcaggggaactcccaggggagaggaggattagggcagaagcttatagatctgggtgaggctgctccacagcacagtagggagtctctgggtcagagagctccaagggctgtagcagcttagggccctgtatctgcaaggctctatcttatcattaggaaacagctgtccatcgagattttatggggtctgcaaaggaggcaggcactaaatggatgaaaatctgcttatatgagctatttttgttaatgactgggcatggtaaaatttgagttaggtatgagccaagggatcagcaccagtcgacagtgaagaaataaacaaccgaggggccaatacacagaaacaatctttgacttgtttacataacacctctcctccaaaaaaagaaaaagacatgacttttctaaaggaagtcctgtctacagccataccaccctgaacgcacgcagtctcatctaagggaagtcctgataaggaagcagaataataaaaaagaatcctaaggaaacatcagaagtccccaagcatccccatcccatgcaccctgacccctgccctgcagcggatcttctgtcccaggacccaccagaatagaatggcagagggacacttcactcctccttgccctccctcttcagtatttaggattccaggttagtctgttttcaaaactttaagttgagtgtatgaaagataccctagatcaccactgcagacccaggcttagctactcacatgcaggctatcttcattcccgacagggaaataaggcaacccaaggtagatatctgccttccctgcaaaactcatgtttttattttctctttctctttcctttcttttctcttgctcactatctttctccttaaattcttcccttttcttttagttaccatttctttttttgtttctctccttgactcaaatgccaaagatccctagaccaggagtcaagaagcctgcatgctgattcctgggacaccattaattacttctgtgattgggagcatcagcctttgaggcattcatttcctcatctgcaaaaaaactaggctggattagatttatccactgattctgtggtctgtgtctgccagtgacatccacggatgttacttagcaccattagtggcactcaggcctcagaaggtcactgacccccattcgtggtgatttaattcattgatcccagctctctagatacaggatgaacttcataccttaagcaagttgtattcttacaaagtcgtctgactttatcattttgcataacctattatgttttctgccatctaaagattttgtggcaatggatataaccttagtcttttttaatagtcactaaaaatagacaaatccatttcctcaattactgtctgtcacttacaatgtgccactaagcaaacacccatcccttgggtaggggcattgtgggtcttgacctttgggaaggaagtttttggaatgcaccttactcctcttttcaaaacatcactcaaattgtttttgaaatgtctattttttttcttttgagatggagtcttactctgttgcccaggccagagtgcagtggcacaattttggctcactgcaaactccgcctcacaggttcaagcgattctccttcctcaccctcccgagtagctgggattacaggtgtgtggcaccactccccgctaatttttgcatttttagtagagacagggtttcaccatgttggccagactggtcttgaactctggcctcaagtgatctgcctgcctctgcctcccgaagtgctgggattacaggtgtgagccaccacacccagcctgaaatgtctgtcttgaatgatgtctcaagggacctatgaaagatacccatagtggggccttcttttaagtgccaatgtgttgtgggttcaagttccgatagccggcttgacccgacacctgttaatgagtaacctaagtgacaggcacatgaccaagttctaatcccttcaatgtgctggtggctccactggtccaaagtcagccaggagtgcacatcgaaaggttatgggatctggtaactgtgcttacatagaagtcatatgttttggttttaaaataatatataatggcatttacttattttaagtggatgtctaactatgaattaattctgtaggcaatatgtcccacaacacattggcttcttgtaaaatggctgaaaatatgtgttcatttaaattatattgtttagtctgtaatcccagcactttgggaggccaaggcgggaggatcacctgaggccaggagttcgagaccagcttggccaatatggttaaaccccatctctactaaaaatacaaaaaattagctgggcatgttgatgtgcacctgtaatcccagctactcgggaggctgaggcaagagaatcgcttgaacctgggagatgaaggttgcagtgagccgagatcatgccactgcactccagttcaacagagcaagactctgtatctctctctctctctctctctctctctctctctctatatatatatatatatatatatacatatatatatatgtgtatatatatatgtgtatatatatatatgtatatatatatatatgtgtatatatatatatgtgtatatatatatatatatagtttaaaaaacaaactactcttgaagtgagtgaagaggaggcatgtctatcacaaggatgatgcttcatatttctgtgctggggtggggggtgataatgatgaaatattgaggagctcaaggtgcatcagcgccccttccttcccctattttgcctttagaggagctgcctctgagtctgggtctttcagttgttcagcttgcctgggggaagcaaggggtctcttccagacagtcacctttttctgcttttcattgcttgcttcatggtttattttttaaaggaagatttttcctaaaaactcttctagctttctttctctttcttctccatttcctcctctctcagtctgggacaagctccttgagttttttgcaggtactatgtactttgctaaacagtttgatgcctttctctagggaactggttctacaactttccaatggggcctttaattagaaactacgagagaacacttgtagtataaaagtcatctagtcatattctattagtttcatacaggctcatatgaggtcaactcctttcatttagtttctcgaacatagtagagtttttgtaaaattaattatgttacggtgaagatgtacctcaagattttcagcacaggcttcccatggtattaaagatttgataaagtggaaatcgggataagaatcctcattctggacagctactaggctagaatcactaaggggaacagtaatgaatgaaaatttattagacctctctgtaatgcagaatttaccatctgttgcactatcccattagtttttattaaattgattgccttaacctggagagaaaggatatttttgtgtctgccaacctcaactccacttaccttgtaataaatgtttcattcctcttttcatttttcttcccagctgtcagccaagctcagtaaccttccaacgctcatttccatgaggctagagttcctgagaatcctctgtagccatgagcattacctcaatctgaaccttttttttatgaatgctgatactgctccaacatctccttgtccttccatatcttcccaggtaataaaagaattatttaactaaaagaattattcaagctatttcatttaactagctcagtttaatcatgtatttcctataaaggttagtcttattaatttgacaaaaaatcaaacaattcaaaccagatcaagtatgctaccctgaagttacaccactagctaagaattaacaatctaagtaattggtttctccccaggctcaaggctccctgatcaggttaagtaaagccaagaatccaataagccctatgaaatttagaaactcatagaaaagtctcaaatcttcctttgtctgacattagccaattgttatattatgcaaatagaggattccaaagtaaataagttttggaaaccatgtattcaccaggtttctttgcagcaggccctctaagaggttttaacttgttcatgtcaattgcaaatgcacgagaagcagaagaggaaatgggaggaggtgtgcatgataagcagtgattccccaaatgatttaacatggaaaccccaccccacctcatacattttttgaaatgttactctggaataactttaagaacatgctgtttgatagtcacattccatttatagggaacacatcagtagctcagagcatcaggcaaaatttctcattattaggttatatttctgttgcatattccttgatactagtacaaaagtgaaggcttgtcttactaattgaaaaaaaaatcttagccatatatgccatatggcatgatccagatattagctacatgaccatcttactgtgaacagggaaagatctgactcacaagcagcaattcaaaatgtataaactttttgctccatcctgcccagcagcttaagtcctaaaacttccctggactaagcttaccctaggttctttcccaccttccccttctgactgccccagggagtggccaaacccaggggccaggctcacaaaaccatgaaggatttctaaagacactttagatgctcttaatgaaatataaagtgtgctcccaggatacaaatacaggacaggaattactgaggaccggtaaatctaatacttccctccctgacatcacttgtagttccaggccagcaaaagtctgacaatgtgcttaagccaaattcagaagtgtagctgaggccgggcacggtggctcacatttgtaatcccagcatcttcggaggccaaagggagtggaatacttgaggcaggagttaccagcctgaccaacatgatgaaaactcatatctactaaaaatacaaaaatgcatcaggtgtggtagtgtgactgtaatcccagctacttgggacgctgaggcatgagaattgcttgaacccgggagagggaggttgcagtgagctgagaccatgccactgcaatccagcctgggtaacagagtgacactctgtctttcaaaaaaaaaaaaaaaaaaaaaagaaggtacctgagtaagcagggccttaaacaaagggggcatttggttacagaggaattgcctgttcccagccccaggactgggtgaggttcttatttctctgtccaacttttatgctaggatttttatcttcagcttttgatttcaggtgggaaagggagcgtcattcatttttcaacagacccggggtgctttattttcatctttcccgctgggcagtcttctctctgtgggtatgggaaagtgcagtaaccactctgtgcctcagtttccttgtccgccttatctggcaccagagtacctacctcactggggagggctcacgaagcctggctggggcgaggactcagtaaacactggccatcgctattttcattccagttcttgtggctcataaaatggctccttacgtttctgtagaactcaagctcctgctccagcttccaggaccagaagatcgccagcatgttcgatctgacttccgagtaccgccagcagcacttcctcaccgggctcctcttcacagaactggctgctgccctggatgccgaaggggaagggtatgtttctggcatttaaaatggaagatgaagccaaaaaaacagatgttctttaataaaatttgcagtctagcttctcacacttggtaaaaaactctactgtagttgaccagttctgaggagtagaaacatctgtcttgagaatatggtacccataagcacaaggcacaagaaaggcctttcttgtgtagaaaggcaccagggatgggtaagaactacaaaatgacttttcttggtcaactatttcagtggaatttaccagttctgctatagcaggtttcccaaggatgctttgattagtgaactccctaggagcaaagccatttttaacaaaggggatagcatgcagaggcaaccacaagatgtcacttggttcaaagctgatgaaggaaataatggctgctgagaaggcagctgtcccatgcccagattaggtttcttgcagacagtgcttctcaggccaagagacaccacacatccagggcttctgaatccttttacctcttatctatctgattactcagggacatgtggcagtatctagcctagaagtcaacagacagagaggtagaccacccccttctttccttctctccctatgctccgtgagctcatggagtcagaaacccacagcctatctgattggactgaaaaagataatgccttctaaaatattattcattccgttcaacaattattgaatgccttccatgggacagacacagttaggtgttagagtacatcagagatatatcagtgcacaaaacagacaaaattcgctgcccctcaagagctcaccatccagggactcagattcaaagatgattaggattgcaaagtagttgagattcaacacttctggtgtttagattaggcatacagaattgcaggaacttgcccactattccataacagagaacgaaatctaaagccatggtcttcccagtcccttcccaggacccactctcctataccaaaccatctccctgcacagggaacctgttcccatgactcctatgctaaagaggtttccagaataatgtttgctaattaatggtagcattgctgtatgttatggatggatttttatctaaatggaatttctcaagttctctcaaagtgcttacaatttagtgaaggaaacaggaggttcctgcatgaaacaaatacaggagcacatcgagttcgtgcaactgcaacagtcacatgtgtcccaagctatgtacccaggctgacaccgctgaagtgactctatgtctgcgtctcctggcaggatagtgtggggaatctcatgcttttagctctcaattctgcctccttccagataaactggcctgagtatatcctttgagaacttcactttccatggcttcaattctatcttctcttctcaactctaactaaatttctcccaattatctcagtagaatgttctaccctacaactaacataaatttccacagcaacaaaaagtgcaccgaacacttatgctaataagtaagatactgagaagaaagtttgaacacaaagaaaattgccttcatgcacaaacatgtacatacattttcttagttgtcctttaatagcagtactttaagtgatttctagaaacatctttagtatttacaatagcgtagtttctattttctattttcattctagctggaaacagccatgacattctgttctggattccttgtaaaattgttgctgttatattactagcaacaaggtagagtatattcagagataatcatgtaattatgtttaatcaggtagatacattcttcaaacacacacacacacacacacacacacgcacacacgcgcgtgcacatgcacacacacagtaccctttctcccccaaaagagtaattaacagtgtaactcctttggcaacacagtaatccctgattgctgggttgtcagttactctcctggaaagtcattagatacactgtcacaacttcatcatgtaagctaaaacctcagaaaaatgtcatgcttcaacaatacttcctattgatcagcacttcctttttttttttcttttgcttccaagacagttggtagacttgccaacacctgtacatccatggggcaagggccagaaggacgcatctcagtacctgaacccctagggagctacagctccagtttccactgggtttcccttggatctctgacacctgggtatatccacaagtgtctatgcatcgttaaatccacagtgtttttcaagcatttagaaattgtctatcatctttgtgttaagccagcaaattgcaatgcctaattcaaaacacaacccattgccgggaccacagactaagaacaagaaaaacttttgaaatgcaatttacaattatcttactttagccacagtgcaagagtctgagtcatttaaaattttggttaatattttctatataacgttgaattctgatgtagccttattttgtttgaaagaaaaaaatgtatatatatgtatatattttttaaatctggattctttttttattattatcatactttaagttctagggtacatgtatacaacatgcaggtttgttacatatgtatatatgcgccatgttggtgtgctgcacccattaactcgtcatttacattaggtatatctcctaatgctgtccctccccactccccccaccccatgacagtccccggtgtgtgatgttcccacctatgagtgagaacatgcggtgtttggttttctgtccttgcgatagtttgctgagaatgacggttttcagcttcatccatgtccctacaaaggacatgaactcatccttttttatggctgcatagtattccatggtgtatatgtgccacattttcttaatccagtctaccattgatggacatttgggttggttccaagtctttgctattgtgaatagtgccgcaataaaaggattataaatcatgctgctataaagacatatgcacacatatgtttattgcggcaagatgtatatttttaaaattgaacatctatgactaggttccagatactccactatatattttatttactttttattatagtataatttatataaagaacctgaatcctaagtgtaaagtgcgattaatatttcctgtgaatatatttgagtaaccaccagtcagataaaaaatataatattccattatcctctctcagttacaggcccccctcaagtaaccactattctgactcttattattagaaattaatactgcctgttgttgaatttcatagtcttttgctgaatgttgtgactgtgacatcctttagtgtggtcgcatgtgtcagtattcattttttttcaactgtatgtcatattcctttgtctactataatttctcttctgtaaattgacatttgggctgctttctatttgtgggtattgggtattatgaaaacagctgccgtgaacatgcctgtgcatggttttgggtggacgttagaactcatttctttggggctataaatacagcctattttttattttaatatactgctcttgaatagtttaataaatatgtgtacatggtcttaacaaaatgtcaaaagaatatactctgagctaggaaaagaagagcaaacaagtcaaagcaggaagatggcagggaataacaaaggtgatagccaaaataaatgaaataaagaatagaaaaacaatcacggaaatccgcaagatgaaaagcttgttatttgaaaagagcaacaaaattcaccaatctttagctgagctgaccaagaaaaaaggaagaagactcaattactaaaatcataattgaaagattcaacacaatcatatcacaagagaccttacagaaataaaaaggattataaaagaatacgatgaacaattgaaagccatcaaattgataacctagattaaatggataaattccttaaaaggtacaaagtactaaaattgactccaagaagatatagaaaatccaaatagacctacagaagtaaaaagattgagttagtaatcaaacttcccacatacacctactatgtacccacacaaattaaaaatttaggctgggcgcagtggctcatacctgtaatcccagcactttgggtggccaaggcgagtggatcacctgaggtcaagagttcaagaccagcctggccaaggtgatgaaaccccgtctctactaaaaatacaaaaattagctgggtgtggtggcgggaacctgtaatcccatctactcgggaggctgaggcagaagaatcatttgagactggaaggcagaggttgcagtgagccaagatcatgccaatgcactccagcctgggcaacaagagcaaaactccatcacaaataataataataataataatatattttaaaatttaaaacttcctacaataaaagctcaaacctggggggctttactgatgaattctaccaaatatttttaaaagaattaattctaattttttaccaacttccagtcttctcttccaacgaatggaagaggtggaatacttccccacttgttctatgaagctagcattaccctatactaaaccagacaaagacatcatgagaaaactacaggccagtatctgatgaatatagatgtaagaccctcaacaaacactagcaaactgaatccaacagcatataaaaaggattatacaccatggctaagtaggatttatctcaggaatgcaagataggctgcatacctgaaaatcaattgttgtaccatattaataaaataaaggacaaaacccatacaatcatcttagtagatgcaaagaaaagcatttaataaaatctaataacgcttcctgataaaaacactcaacaaaccttttaggaaataagagaacttcctcaacttgacttaagggcctctatgaaaaatccacagctaatgtgacacttattagtgaaaaacagtgctttatccctaagattaggaacaagacaaaaatgtctacccttgccacttctattcaacatattaggagttctatctagggcaattaggcaaaaaaataaaacaaaagacatctaggccaggcgtggtggctcacgcctgtaatcccagcactttgggaggccaaagtggacagatcgctttgagcccaggagactgagaacaccctgagcaacatggcaaaacgccatctctacaagaaatacaaaaattagctgggcattggtggcttgtgtttgtagtcccagctacttgggaggttgaggctggagaattgcttgatcccagaaagcggaggttgtagtgagctgagatcacgctactgcactccagcctgggccacagagtaagaccctgtctcaaaaaaaaaaaaaaaaagaaaaagaagaaaagaaaagaaagcatttaaattggaaaagaagtaaaactatctctattcataggtggcataatcttgtttatagaaaaccataaggaatccacaaaaaactccattacaactaataaatgaattcagcagtgttgcatggtataagatcaacatacaagaatcaattgtgtttctatacacttacgatgagcaatctgaaaatgaaattaagaaaacaatttcatataaaatagcatcacaaagaaaaaatatttaggaataaatgtaacaaaagaaacacaagagttatacactaaaaatgacaaaacactgttgaaagaaagatataaataaatggaggatatcatatgttcatgaatcagaagacttattattaaaatagcaatactccccaaattgatccatagattaaatgcagttcttctcagaattctagcttgcttttttttttttttggcagaaattagcaaactgatcctaaaattcgtgtggaaattcaagggacccagtatagccaaaacaaccttgaaaaacaagaacaaaattggaggactcacacttcccaatttcaaaacttactacaaagcaaaagtagtcaagactatggggttctgacatatgatagacatatagatcaatgaaattgggttaagagtccaaaaataaatcttcatatttatagtcaattgatttttgacaagagtgccaaaacaattcaatgggggaaaatagaattttcaataaatggtgttgggacaactgggtatccacactcaaaagaatgaagttggaccctatattacactgtatacaaaaactaactcaaatagatcaaagacctaaatgtaagagctaaaactataaaattgttacataaaattatagaggtaatcatcatagacttagaaaaggcagtggtttcttagatatgacacactcgaaagtatgagtaacaagaaaaaaatagataactggacttcagtaaaattaaaacttttgtgatttataggacaccatcaaaaaaatgaaaaggcaacacacaaaatgggagaaaatatttgcaaatcaaaaacctaataggggacttgtatctggaatatatattttaaaatcttacaactcagtaataaaaagacaaataactcagttttttaaaaggcaaaagatcagaatagacatttctccaaagaagatacagccataagaccatgaagatgttcagcatcattagccgtcagggagatgcatattaaaatcacaattaaataccacttgatacccacgaagatggatataataaaaaagacaggtaataaagtgttggcaagaataaaatggagtcttcagacactgctggtgggaatgtaaaattgtgcagccaccgttgaaaacaacttgctgattcctctaaaagttaaacagaggctgggcgctcggcggctcacgcctataatctcagcactttgggaggctgaggtgggcagatcatttgaggccaggagttcgagaccagcctggccaagatggtgaaaccctgtctctactaaaaatacaaaaattagccaggtgtggtggcaggtgcctgtagtccccgctacttgggaggctgagtcagaagaattgcttgaacccaggaggtggaggttgcagtgagccgagatcgtgtcattgcactccagcctgaacaactccatgtcaaaaaaaaaaaaaagttaaacagacagttaccatacaagccagcaaatgtactctgaggtatgtacccaagaaaagtaaaacttaaaacttgtatacacatactcatagcagcgttggtaagtcacaatagctcaaaagcagaaacaatccaaatgtttatcagttgatgaatggataaaattcaccaatggaatattatttagcaataaaaaggaatgaagtactgatgctacaatatgataaacttaaaaacatcatgctaaacagcagacccagggttagaacacaggcagtctgtttctggattctatgtagttctatcctatattgcttggttttccagggttagaacacaggcagtctgtttctggattctatatagttctatcctgtattgcttggttttccagggttagaacacaggcagtctgtttctggattctatgtagttctatcctgtattgcttggttttccagggttagaacacaggcagtctgtttctggattctatgtagttctatcctatattgcttggttttcacagtcacctcattgcttaggagcgttttcatcactcttgactgtttaagagctctttagtcaatttcctttcaccataacctcttgattcctgtgttgtgccaacagaatcagcaaagtacaaaggaaagctgtcagtgcaattcacagcctgctaagttctcacgacctggacccacgctgtgtcaaaccagaggtgaaggtcaaaatcgccgccctttacctacctttagttggcatcattttggatgctttgccacagctctgtgactttacaggtaatggcccttctgttttctttcttggattgttgggggcccctgccaaatgccccatccgaatgagatctctgtcattcgttccagtgctgatatgttcatatgagcaattcttcacaaaaatggtctccaaacctctttaacactggccccaatcagttaaaaaaacaaaaaaagtcacatagccccatatgtgttttttgtttagaaattatttacttgtttcttcattcattcatttattcattcattgatctgctagtatggaatgaactttataaaccatacaccacaaaggatgaaataataacaagattactgcctttggagatcgtgctctaacaccttgaaataaaggtgttccttcccttttcttttatgaatatgtaagcaaaaaagcggtctcaaatgaacccaactaattgctccatgcaaaaaaaaaatcatggcatatgtcaatattagaaaattctatcatagcagagaaatattgcccttggcactaagtgactaattttgaggttaatatgtctagattagcaacaagatgaaaggataagttgtcttaaaggggttttgtgaaaccccagaatctatttacaaattacattgtggattaaggaatgtagagggaaaaaaatcctcccaaatagaagaacttcttatgttgacctgagaaaggcagtccattggcctaccctctccacagcgtacgtgtgtgtgcacgtgtgtgcgcgcgtgcacacacacacacacacaattcctatcccatcagagtagttcttgcttttcctccagctcaagggaagttttggaaatgtccatgctgctctcttggcagctgaagggtgctgggatctgggcaatgcttccctgagccagcctctttatagtcagtcatccttgaaatcttggaaccatccaggttttcccacctcctccaaatggaaagtgtcatgtgtgactaaattgtttataatactattacggtgacaagtatttagttcatgaaaatgggaccaaacgcctatagtctttaattcatacaaatcataaaatgaaaagcaagtattcctgtggaagtaattctctcctttcttgaaaaaaatcctctagcaaactgctaatggagtaactcagaagagaaaggttgagacaggggttagggtttgtagagttctgttggggccagagtgcaaggaaatgatagaaacaagctcagcacacagggctgagcaagctgcaccatgaggtcagcagcttcctctagcagcgcctgattgcgcggaattgaaaatggagttgtttttaacatttacagacataatgcagagcatggcatgtgacttgtagcccattttgagaatccttgatggcaagtttctaaaaagttccatttcaagagcttgcttgttcccaaagccaggaaccactttagcacacattatccgaagttttcttgtcaattagaatattccgtatcagtgactcggaatcagaacttttcaacatttggtctccaagccttttaaacctcaaagacttctttgtatatgcgttgaactttatgatcatgatgtagctgatgagagaaaaaaacagtgaaaagtattttattgttataggttacacagtacatctattaaatatggaatctttaggttgataaactcataagaatacagtctttcaaaaagatgcatctgaattcagattccagccccatttattaatataagtgacctttgaaaggctcaacctttccgtgccttcctttcctctgtaaactataaaaatgtgataacgatgtctaccttttaggtttacgataaaggtgaaactagagaacttctataaaagcattttgcacagcacatgtttgtatctttcccgatttttcttgtaactataaccctatggcaattaaggggaaataagaatgtgtctctatgttagttgtgataatgttatcaggtcttgcataatttccatgtgctgtttatttaaccatttgtttaaaatcccaatggccttaataagtatttctaaaaattgggttttggctcggtgtggtggctcacccctgtaatcccagcactttgggaggccaaggtggacagatcacttgaggccaggggttcaagaccagcctggccaacatggcgaaaccctgtctccactaaaaatacaaaagttagccaggcgtggtggcgcacctgtaatcccagctactcgggaggctgaggtaggaggatggaggggcagagattgcagtgagcggagatggcgccactgcactccagcctggatgatagtgtgagactttgtctaaaaataaataaataaataaataataagaactgggttttgttttcacaactttagtagaagaaatgttatttacactcaaatttttctaaataattgaaggcccagatggctgtaatgtcaacaggtctagaaaaacatgaatttttaggaaaacatgagtgaatcaatcagttgtgaatgttttaccacacttttcccagaactgcttgaaatattaatagtttttgattgtatactggtagcattcttaaaaaccagacttttaaacggtttatcgtttttttgcttgcatacatctagacctatctataaatatgggtatgtctatattacatagatacaataaattgacattcattttaaacatttgaaatatgacaaattattgctgaacttgtgataatagcttattattctatataaggtagttgcttaattctgtaattgtaggtgtcttctatttggtcattatttaaaataatgccaattattagaatagagaatgaagtttaaaaaattatgttacaggaaacaattatggaaggtttgaaaactttttgttcacacaatttgaaaaattaatttctagcctaatcttgtgctagacattgtctcttagcctgctgtgttttcctataggtgatagcagatacataatgctaaacatcaggtttgaaattactgtgctgactttagtgactgagaagtatcagtctcttattgggtaggggacatggggaaatgtcatgtttgacttgacatcacaaacgatgttttcattgcagttgcagatactcgcagataccgcaccagtggctcggatgaagaacaagaaggagccggtgccattaaccagaatgtggctctggccatagcagggaataatttcaatttgaaaacaagtggaatagtgctgtcttccttggtatgttggtgcacatgtgtctggttgatttttcatttcatgtcttctgtcttctgttttgttttgtttgtttgtttgttttgagacagagtctcactctgttgcacaggctggagtgcagtggcgcaatctcagttcactgcaacctccgcctcccgggttcttcatgcctcagcctcctgattagctgggattacaggcgtgcaccaccacacctggctaattttttttgtatcttttagtagagacggggtttcgccatgttggccaggctggtctcaaactcccaacctcagatggtacacccacctcagcctcccaaagtgctgggattacaggcgtgagccactgtgcccagcctcttctgtcatcttctgatgggagaactcagcttagagcaggcattgattatttccgcctcattttgctggaaagaatcattgtgaggctggcagctgaggtgcacacaagtcagaaagggttctggcaacagcaagagatgtgcagatcaaattcaggcagtcccagtggtgctgagttcaagttcaagaaaccggaaaagaggaaaacttgggaaatctgaaatccttgcaaaggagatcaaaccaaggctctctgagggtggaggcttaggctgtgttcagtctatgtgtgtgtaattcatacagtgtaatgcctccaaaaaaaaagactgaaggaggctggtagcttagcgtaagggcttcttaaacaagactgcagcttttctaggaccccagggagcctaaggagggttgtttggctctgtccttttgcatggactctgtgggctcaaagaggggctcctctgggaatgtatcctctgattcagttgaggtgggattcatctctgttcattgatgagctctgactatcccttgtgaagacagcactgcatcctccaatgtcatttactttcacatttcaatgtagggtatagatgtgcagagaatttaactttcttctcccgtgagaaagcagcatcctgacctaactcttcttgctggatgactttcttgtcttccttcctgcacttagcaagctccatcaccatgaggattggggggacagtgaggcaggaagatgagacagagaaaagacatttgagatttgacatcaccgatcttactgttggagaaatattgtgtgacctcctccacctttctaatatccgtcttaccaaagttagctgcttgaggtggtatatgccttttacattatttgcctctaagggaaaaactcaaaagcccaaagttcacctgttagaacatagtccttgtgaggttgtatctcaagatttcctttattcttgtcaacaaactcagaataactaaagttaaagttgctttataacctctattatttccatccaaaactaacatttccctcccatacccacaaattcctcattgcaatttcaccagtacattccactggatattagctacgctgcatgaaccaagggtgcagcctcattgttgttgtttgtgttgatgagatgagtaacagagagtgcgctcagcactttaaaatgaatacttgtggccaaaatattaaagcaaatagcctgaacccccacaccccagccccaggcaaacataaattatggttaaacttccattacagagaactccacaaacatggatttgattaatttgctgagcagttcatgacccttatgttatactttgcactatgtaacaaagaagctaaatcttgaacagcaagcttattcatggcacccagccagtttccttctcccctgtaagtctaaccctctgctgcccagcacgaaggagaaatacttggagatcttagcagcatgaaagcctctttgtatcactgggattgcagcacgcatgatcaaggcccaggggtgatcaccaggccacactgctcctaagacagaggtactcagatacgtggctgaaagcctagctcaaatactgccccaggtgagcctctttgctgagtagcgctactcaaagaacacagcttcccctgcctagggaaggcagggctactggcaatagatctccagcctagcagtgatgtacagtcatggtattttaagagaacactttgaatttttctgttgcttgactgttaagcctcaaatttttctgttgcttgacttcttccctggcctccatcccccaatctgcctcccttcagccctataagcagtacaacatgctgaacgcggacactactcgcaacctcatgatctgcttcctctggatcatgaaaaatgctgatcagagcctcattaggaagtggattgctgacctgccatcaacgcagctcaacaggattttagatctacttttcatctgtgtgttatgttttgagtataaggtaagtctggagtggcacaactttataccagctcttatctctcaattgcaattctgtcttcttactcatcccctttgtttgggccatggaggcatcattaatttttctcatttctgtattcaaatccataacccatttgtaggtatagatatgatcatttcacagggaaaggatctctgccttctgcagagagaaccccatttctgttgacagagttttggcccataggatgctccagagcagcatctcagtgaagcacatgtcaaacttagctggcatcactgtggagtgtactgttttggtaactctccccatcaacggagatctcaccaaaggacatgtcctcctacctctgtcttgtccagggaaaacagagttctgacaaagtcagtacccaagtcctgcagaagtcaagggatgtcaaggcccggctggaagaggctttgctccgtggggaaggggccagaggggagatgatgcgccgccgggctccaggtgtgttggactggcccttccctgctctctgtcaagcagtttttcactgtttgtggggaggaatgtcctcccaacatgattagacaccattactttcttgagatatttacggtagtgtcagagacagcggattctgggagtctgtgtgtgacatttgtgttagccctgtgcctgtgagggaaagcgctgttctacaattgtaggaaccctgaaaacagcaccaaatgacatcttttaattaaaactcgttgatggtaaaaggtcacctctaagaatgtcagtcatggatgaggtggaaggtgtttccctcaaggctgaggcctttctatgtgacctttggctagtctatccggagcatggtcaagaaactgaacagttctggccccaagatcatcttctcgatcattcagggcactattagaatggaaccagttccctgaaatggcttcagagtgtcccagtcattcaaggattccaccacaggaggaatgatctcaaaaaggctgagcttgaatagaatgaaatccccaggtaccctcagtcttattcaccatgctcaaagtaaaacagagtgacagcttattgtattcgaagggacacagtggcagggaacttggagggagctcatagttttcagtggtggtcaggcaccctcatttgacacccatactttcatacccaataattcagtaagcccccagagtttcacaggaatcctctgctcatgagaaatgtctctctgacactcagaaaggcagaggttcttcttatattctagtctatcaatcaaagagcgggccaacttggacataggtgtggcgactttgtctcctaccagcaacctgcatggactctaattagcccgagaaatggtgctgaggcttctcagttgagcttgttatgaacttctggttatcttggagggtttcatgctaatcaaattcctatcatgcatttcttaactcctagggaacgaccgatttccaggcctaaatgaaaatttgagatggaagaaagagcagacacattggcggcaagctaatgagaagctagataagtgagtcactcggcaactttctgctacttttacctaaagtccaaaactatttttcccaggctgcttgtattactgaaacaactgcatccttccaagggttagaaaatgaaacatcattatctgtgtaaatacaattcatccagggacccaggataatcaaaggtatagggagttgtggtttccagctcttaaaaatttgtcacattgataagcatgtaaagaaaactaatatttctttagcaacctcagatggcttaataaaagcagctgattttgcagggagggtagcagggaaatagagaaagcaggacacggtgcctaggaccgtatactttcaaatcgatatttcctttctggaaatatgtacaagatatacattcagatatatttatgtcagtgctacttaaagttgttttttaaaattgaaaacattctaaatgctccagaatagaaaaatatatttaaaagttggattgccatcaaaatgttttaaaatcatcttaatgacatggggaaatgcttatgacataatgttaaatgaacaaaggcagggtagacacttggttttctagtagtgtgtggctcacgcctgtaatcccagcactttgggaggctgaggccggtggaacacctgaggtcagtagttcgagactagcctggccaacatggtgaaaccccgtctctacaaaaaatagaaaaattagctgggcatgatggcagatgcctgtaatcccagctactcaggaggctgaggaggaagagtcgcttgaacccgggaggcagaggttgcagtgagccaagatcgtgccattgcactccagcctgggtgacagagcaagactccatctcaaaaaaaaaaaaaaaaaaagaacctcaaatctctgatgacatatagtcaatgtattttttaaaggctagaaggaaatttaccaaaatattaattgcggttttctttgggtgctgggaatatcggtaattgatgttttctcttttatactttgctatgtttcctacagtagatgtgtattataatatatattgttaccagaaaaaaaattataaagaaatgaaagaataaaaaaacctgtttggatcaaaatctatgctatagatgaatagatatattgacgtgtattgctatatatgcaacaatttagacatatgaaagctaaaagtatatatgtttgactagatagcacatgtttccgataccgtttagccacaggtagcctaatgagtcccagggtttgctgagcaaaatgtcgtagagctaaaatcacccctcacacacagttgacaaggtaggataccccatgggtgatgaagcacccatcaaagggggtatggggcagacttgattagcagtgctgttttgtaaataaatgtgagttaatatctttattgttaccacaagaatgaatcattctggttaacttatgggactttggggagtcacatttattttaaaacattaaagaaataagtatatttttattatagatgtgacttggaaacccagttgttggtatcatgcctatttgctttgggtatgttattcttgcactaaattccctggactgatttataaaatacttggatcggagagtccatacattctacttcgggcaatgaacaacaactacaaaatatgcatgccgtgggtgctacagaattgcttaggtggtttagctcatctactctactagattaaaagaagacccctaagtaggcctgttttgcctgggctgtgtaaactggtgttttggaaaacctttcccttttgcttgcaggagcaacacaatattggtccttaccacgcatggcctaccggtttgctctaggttagttctcagccctgcgctacctggtgggctgctggttgtcagagctaatgattcacatctacaaattctcaggggctttgtgctttttttttttttttaaaagggaaaccatagtaaaattataactgttcaacctacctacctggaaaatttataattataataatggtgtctttcaccctctttctgatcatttttcgattattttggctctgtttcttttagagcaatgatcttcaacttaggctgcacattagaatcacctggggagctttaaaacctgtcagtgcccagctgcaccctagactacttcaattggaaactccagcaggacccagaaatcagtatttggtaaaacttcccaggtgattctattgccaccaaatccattgttttaaaggaatagatggtaagcttttcttttcttttttttttcttttctttttttgagacaaggtctcactctgtcacccaggctggaatacagtggcacaatcacagctcactgcagccttaccctcctggcctcaaacaatcctcccacctcagcctcccaagtagatgggactacaggtgtgtaccaccacaactgcttactttttgtattttttgtagagacagggtttcaccatgttgcccaggctggtctaaaactcctgggctcaagtgatccacctgttttaacctcccaaagtggtgggattacaggcatgagccactgcgcctggtcagatggtaaagcttttaaaaaaccagattagtgttagtgatggttgcacaatatgaatgtacttaacactactgaactgtatacttacaaatggttaagatggtaaatttttatgttaggtgtactttatcacaatacaaaaatttgggaaaaaacagattaggacactctagatttgtgctgtccaatacagtagccattagccacatgtgactatcaaatgcttgaaatatggctagttcaaattgagataataaatcaagataagtgaaaaatacgcaccagattttgaaggcttattgtgaataaaagaataaaatatttcactagtaatttttatattgcttacatggagacagtattttttatcttttaggataaacaaaatatattaaaaataatttcactttttctttacttttttaatgtggttaccacaatatataaaatgacatatgtggcccccattgtttctactagacagcattgctctaaatttaaaactaaactagcagtcaattaattaaaaaggatgataaggggccgggcacagtggctcacacctgtaatcccagcactttgggaggccgaggtaagtggatcacgaggtcaggagatcgagaccatcctggctaacgcggcgaaaccccgtctctactaaaaatacaaaaaagtagccgggcgcggtggcgggcgcctgtagtcccagctactcgggaggctgaagcaggagaatggcgtgaacccgggaagtggagcttgcggtgagccaagattgcgccactgcactctgcactccagcctgggcgacagagggagactccgtctcaaaaaaaaaaaaaaaaaaaaggatgatgaggttaaaatggtaaatttgatgttatgtgtactttatcacgatataaaaatttgatggctcatgcctgtggtcccagatactcaggaggctaaggcagagcatcacttgagcccaggagttcgaggcttcagtgagctatgatagtgccactgcactctagcctgggtgatagagcaagaccctgtctctaaggaaaaaaaaaaaaaaaaacttttagatttcatttattttacacatatattatcacttggaaaatgagaaaaagtgtcaagtggcttgggaccagagagcctatcctaaacatgaaaacaagtaaaacacacagaagtacttattttttgagtcctcagtggtatgtaagcagctgcagtgcccccattattaggttaatgggacgcaagaacaggtaagtggtaaccctggcccaggacatatgagctgatataatgataccccaaccccatggtaacatcttggctactgaggcatcttggtaaagtcaattcttcatacctccctttccttgcaactagatttggatgatgatacaaaatatccctttacagcttcacttagatttcataagaatggatgggctagcaaaaaaaaccattctgattccttaaagtgaaacctaatagaggagcgagcaccaggcaatttcccattccctagtgggcaatgaccagtaatgtccggcaggatattagatcacctgccctacaggaatacagtcttgtttcccaatggaaaaggacgaaagaccccacgcacttggctgagcaacctcaaggtgatctttgggaagttaagaggctgactctcccctgacttggctctgaagctccaccctttcctaacccagccgcatcactgccaagttcacatcacatccagtctcactctctctcgcatgttgcaggggcttccccttactcagatctagcaatggttttcatgcgtgaaatacagccatggccctgaggctttaggcaacaatctgagaggggagcttaattgctagtagcaactaataactgcttctctacccatagtgttatttttataattgtcctcatcattattaataatagtggggatgaggatgaccaggaaaccttacctagacagttgtttcgacaagacatgaatcacagaaggcacctgcactgtagttactcagggccagttgctctgttttcatttcaaggttgactattttggagatttctttacaccttggtgtatagattgccatcatgggaacctggccaggtttgacatgcgctttaatttgacctcttgttgtttcctagaacaaaggccgagttagatcaagaagccttgatcagtggcaatctggctacagaagcacatttaatcatcctggatatgcaggaaaacattatccaggtgaggaaaacaaacacccaatctgatttgttggccatgaatatgtttactagaataaggacttctttatgcaaaattgtgaaagacataaatgtgatcccatagtaccttttttaaaaaaatgaagttgagaagtttactatttacaacagtgtctaccttataaattccagagataccaaacattcttctggcttctttgacttagggcttacttggagagggttaggtgtttggccagctgaccctcttggttaaatctgtgtgagtatgtaccaagtttataatatggatgttgggtttatcgtttagtatctagaacagtagtggtaagtagaattttttctgatgggtcaactccagttgaatgatggtcactgtctgatatgggagctatgattatgactaggctaggtaaaaagagtgctaaatttgacaaatgatgtcttctttggacttaaatttgttaaggaaagtcatttgtaccatgaatttgccatccctgctgtagaaaaatatagctttgtgaactttgtaccatactaattttatcttctatgtgattatttccacaaattcccaagctgtctaggtaataatgagtttttaattaccctgaaaaatgagttcttacatgtttccattgagaagtcattcattagagtaggtccaggattgcttttagggctagaagaaatatcgttgaaacacagtgaaatcttaattctctaacttttgaattgtctaaaatcaaagtaatcatcatacaaaaataaacacaaaaagtatgtgatatttttgttgactttaatatctttgataacttaaatgcttggtatcacatttaccttatctttatatagcacaatattaggtgccaaatatctatactagcccccaaatatatttgcagttttcaaagaaagctgaaaccttttgttattatccttggtgttgttagtccttctgtaggtgataaacaagcttctatttagaaacattgctgccaccaagcagcccctgttgtactgggaagcccacaattgtgttttgcatcccataaggaaagctatgtcttgtatacaaagaaagaactttccaaaagatgtgacccaggatgagggagatgggccttataccttcatttaggaacccagaattaggtataaatcccaaactcattggaagcattgaaataaagccatttggaaataggtcttcagttcccatggttaatggatgatacccatggtggctcaccaaactcttaagactcaccactggacatggaacatcagcattactgagctaattgtcaggaacatccagttcattggcacagtgcagggattcaatgatgctgttcttccattcccccaggcgagctcggctctggactgtaaagacagcctgctgggaggtgttctgagggtgctggtgaattctctgaactgtgatcagagtaccacctacctgactcactgctttgcaacactccgtgctctcatcgccaaggtaaacttgggatgcttgttttcttcctcttaattaagagtaagattctcatctagcttcatacttctctcttcaggtggaccaaaagtcacagagcatattaagtggcatcacagtaaaggtcttaagtcttcctaggaagaaagcagatgccctgattctgtgggaagccaccatggagaggaaaagcagtggctcccatatttgaagtgtggacctaactctagaagtttaaaatggccattcgctgaaggtctatgacatgagaacagagatcaactgagtgacttagcaatttcactctttctctgtaatacctctgctgagtgagattaaatcctctatgtgacgcccattagtcttacaaaatgtcatgccataaaatgccaggaaggtcagaaatgaatttctcacggcctgaggaatgaggattatcctggggtaacatgcagattatttttccctttatttatttatttatttatttttgagactgagtctcgctctatcgcccaggctggagtgcagtggtaccatctcagctcactgcagcctctgcgccctgggctcaagcgattctcatgcctcagcctcctgagtattgggattataggcgtgtgccaccgcacccagctaatttttgtattattagtagagacagggtttcaccatgttggccaggctggtcttgaactcctgacctcaagtgatccacctgcctcagcctcccaaagcactgggattacaggcgtgagcccccgttcctggcctatttttccctttattgaagatctcaattggtgccttctacatggggtcttttaaatttaaaaagtaaaattcttctgctcatccttctcaggaccattttctctttcttcatcaccagtaatttcccaggaacccaagaaactcaggtttccttccatcatagttgtgatttcaccagtgaatgcgacctggctcacagtgcagttgataacacagctctgacccttttagctggacagttcattattaaatctcaagtctactccattgcttaaatccatcttctgattcacatagctcattatctttatggaataatgcattaactcttctaggctttttgcttgtccaaatggacatttgcatatttcaacggtccagaaagtgtatcaaactgccaagtgatgcctaatggccctttatgtctctcctagtttggagacttactctttgaagaggaggtggaacagtgtttcgacctatgtcaccaagtcctgcaccactgcagcagcagcatggatgtcacccggagccaagcctgtgccaccctttacctcctcatgaggttcagttttggagccaccagtgtaagagttcaaaccagctgagtgacctggaatcagtagagaaaaattgatgtaaagcatcagctgcgaaaaaaaataaggaaattttgcagtattgcagtttacttctgtcctgtgagaaagaaacaattgagtatgtagatagatagcagcttccattttaatttgcatctaaaagtgaattcatcagataaatgcagtggtctctatcagtgtgtttctaaaatagacagccaggggccaggaacgatggctttcacctataatcccagcactttgggaggccgaggtgagtggatcatttgaagtcaggagttcaagactagcctggccagcatggtgaaatcctgtctctactataaatacaaaaatagccagatgtgttggcgcatgcctgtaatccaagctacttgggaggctgaggcaggagaattgcttgaacctgggaggcagatattgcagtgagccgagattgccccatttcactccagcctggacaacagagtgagacttcatttcaaaaaataataataataaaataaaataaccaggtgcagtggctcatgtctgtaatcctagcacttcgggaggccaaggcaggcagatcagatgaggccaggagtccaagactagcctggccaacatggtgaaacccccgtctctacaatacaaaaaattagccgggtgtggtggcacacacgcccgtaatcttagctactggggaggctgaggcacgagaatcgcttgaacccaggaggcagaggttgtagtgagccaagattgtgccactgtattccagcctgagaccctgtctcaaaaaaaaaaaaagaaagaaagaaatggaagagtattttagattaaaagttatcatctgtgggggaaaaaatacaatagacaggttagaattcagaagagtgtttcctgtttctaaattctgactagctagtgccagaatgacctgtggaagaggattttaaatgatcggtgtcatctaacctgagttttattttaatattttatttatttatttattgagacagtgtcttgctctgtcacccaggctggagtgtagtggcactatcagagctcactgcagccttcaactcctgggctcaaatgatcctcctacttcagcctcccatgtagtaactgggattacaggcacgagccaccttacccagctaattttttttgcatttttgttgagacagggtcttgctgcatgcccaggctggtctagaacacctgagctcaagtgatcttccctcctcagccccccaaagtactgagattataggcatgagccatcctgcctagccaagacttgagttttattcaaagctacgaagactttggagttcagctttattatagaacagtcaagtttgctttagtttgtctagattttgataccttctttggaatttccatttgtggccatgttaataagtatgctcaagtgatatataaagataaattggcccatggaaaaaagtcagcctcctccaaatgtattagggatgattatttaaaagacattcctcaggggaccttgaggtagccatgtttttccatgggcctgtaaagaaagaagaaacaaaaccttgttgcttacccggagttcaaaatctcagaaatgctggccacagaagtcccctgatttatttatttagagacagggtctcgctctgtcaccgtggctggagtgcagtggcgagatcttggcccactgcaacctctgcctaccaggtttaagcaattctcctgcctcagcctctcgagtagctggaattacaggtgtccaccaccatgcccagctaatttttgtatttttagtagaggcggggttttgctgtgttgcccaggctgatcttgaactcctgagctcaagtgatccaccctccttggcctcccaaagtgctgggaggctgagccagaagtccctttcttttaataaagtttaaataaagtcccaagaagaaactcttggcacaaaaggatatactgtattcttggacccaactttataagaatcttccagcttgcagcacaaaggcagcccagtcctcaatgaaaatttaaagggagcctgacagatttatgtgagagcaatgtccatttaaaccatttaaacaacaatatgaatgttgtgcaaagtgtagctcccatttcattgagagaagaggaaataattaagacggggcaaaggaaacactgaggagttgtttgtgtctggccatgctgctttcagttatctactgctaagtgtgtcttatttacttcatcttttttttttttttcactgatgcagaattttgcaagagtaaagatgcaagtaaccatgtccctggcatctttggtgggaagagcaccagactttaatgaagagcacctgagaagatccttgaggacaattttggcctattcagaagaggacacagccatgcagatgactccttttcccacccaggtacaccgaagcacataccttgtctcatgcatgagtttgggatctgccaactattgtgtatgtatgtatgtacatatatacacaatttatatataaatatataacatttgcaagtatttattgtccaatatgcatgtgctctcagcactctgagaggttttaaaaagaaatacatccatcactgtccccagtctcaatatgctaacagtctatttggagtgctcagtctcaaaacaattaggaggcagtacaagacaagtgatacataagtgcaaactgtgtggtaaggagctaaatgctatggaaggttagaggaagagaggtcgtgatcaataaacaatctggtggccaggaaagcctgcagggagggatgacactaaaggctggggtaggattccgctaggcaggggaaaagtgagggggaaattgtgagtagttgaaacaatgaattgtttgtatctgtagggatggtaaagggaccagcttgtctggtgaggggtaaggaagggccgagtttgagagagcttgtaaacaaggttgtcctaaggaaatgtgtaaggacagtcatctcttccatgtccattacgatgaccgtggaactctagcctgtcccatttgtcttttaactccagctcctagcctgctctatggtagggtcttaattaagtgagaatgaatgaatgaatgttttcttttattcccttagtctgagaaccctatttccggagtctgttttgccctctcgggcaatgttgcatcctcattctcagaatctttttcctctcctctacatcaaatcgttcctctctcatttcatcttgaccatactcctttagttccatcatttatatagaggtattcaccaacaagaccaatcaaactatgggcagtttaataaaggtcttcagtgccttcacccaatgaaatgactctagtggtagaaattttaggagccctggcaagctggcagaggggaacggggataagacaacattctgtggctgagttacctgccagggtctctagatcaagccatagtctctccctgtttttgtactgcaggctcccctggacctccactgttggttttataattaagaataaatgattacaagaggttctaaaatctctgaagccctgggaagatccaggaggcttctgagacatggaactcaagctgaggtcctaagctgcttcctacttggtataaaaatccctgatattccagagtagagtttagaacttttcaggttacaaataactgaaactggttcaaactaatttaaacaaaaatgttggagatagagatagtatgaggattcaggcagatttctggatctcaagggccaacacacatccaggtctcataaactcctgggctggcgaagatgaaaactacagagtcaggtctagatgactccgccatccctagtctctgctgccctctgatccaacccttcccatggcttccccttgcatttcaatgtaatcctaactcttcacctgggactacaaagctaagattattttgaggcttacactttttgcaggtggaggaacttctctgtaatctgaatagcatcttatatgacacagtgaaaatgagggaatttcaggaagatcctgagatgcttatggatctcatgtacaggtaagctttcctgacacactcaagggacaccatttgggggtcgaggatttgtcactgtggagttcttactaatgtaatgatcacagctaacatggatatagtgatttggatgatagccaaataatatatagaaattaaacattcagagtaggttaattcatatgtaagttttcagaaggatctccctaatttaaagtgaggcataataatgttattaaatataataacattattaaatataataacactatcttctacttaccacagaatcagagaaagaataattaactgttataggaattattttccatatgcttttgttccaattatattcagacatacatatatagttttactttagaaatcattttttacgcgtagtttaaaagttggtcttccagtccttgttcaggagaaattacttacagaggcaaaattgttctgatgcaacatcatacaaagggcagtacttttgtcttctgttttattttgagagaaaggaaagaaaaggcagaaatttgcctgagagccattaaaatagacatcatgttatcaggtattttttccccataaggcttttactaagtactatttcttggaggtcagcacagcttaaacatggaataaaaatagttggactaataaatgttttcttctgtctcgttttctggaaatatagggcaaaatctcaggtggaggggtacagggaactcttggggagaaaaaaagaaaaggtcacacaaagtagaagaacagtgtcattaacccactgtcctcaaaactacttctcactcaatctgtcttcagaattgccaagagttaccaggcatctcctgatctgcggctgacctggctccagaacatggcagagaaacacaccaagaagaagtgctacacggaggctgccatgtgcctggtgcacgccgctgcgttagtggctgagtatctgagcatgctggaggaccacagctacctgcccgtgggcagtgtcagcttccaggtagggtgtgtgcagcttttcccttagagcagtggttctcaactggggcgattttgtcccccagccccagggacatttggcaatgtctagatacatttttggttatcacaactgggatgggtgagtaggtgctactggcatctgactggtagaagccaggatgctgtgaaacattctgcaataggagagctcccctgacaaagaattgtctggccccaaatgtctgtagtgctaaggttgaaaaattccaagttcatacattacatttgcttcttctaattgctttcccatcgtcgttgggttttttttaaattactgtttacaataatggcacctagccattattaatagcactttaggagacatttgcaaacactttcacatgcatggcttcatttgaacctccccgtaaagctgtgaggcaggtaggtagggaaggcggttattattcccacttcgcggatgagagaactgagagagcaagttttctaaggtcacttaaactctttttcaaagacttgtagttgacacagtatactgacattgtgaaagtttggaaaacattggataaatgattttcctcctggcccattcatttgattccactcttcaactttataggggcccactctccaatccaaaaatcaagaaagaatcaaattgacctgagaagggagacaaaaggctgaatcagtaccttcttaggataagctgaaaattacccacatttggcaaagggaaattgtctgccagacctaaaagctggctcggatggggatgctcagtggccacttaaagtgttcttactgaatagtttaatagtctttagagagagagaaaataaaaaagcacaatgttgggtactttttttgtaagagacatagtttgtagagatgaccatccctgaaaccatgaacaatatagctacagtaatagagtgtttttcaagccagactcacgaagtcatttacaagggtttgtattattcttgtttgaatttacatggctgattttatgaaaagctttgttcttgttattgttcttcaacacaattttgtgatgttgtatgaaccagaaagaaagaacaattcaaagtagcttccccaggcttagagaataagtcactgaaactatgctggtgcagccaagagcttctggttttccagaacacagcaaagctgggtattgcctcctatgaataactcctcctttcttatggtcctcaagaacaaaaatagtcattctgtgatttcatgcttggcaaatgaattttcttcttaattcagaaatgtttgttataaaagctgataattaaatctcatccaaaagcataaaaataacacctgatttcaaatcacatagaagtgtacaagaaagttataaaagttattttagatgtatttgcttcttttctcaaatttattttgaccatgtgatactatcaaaaataaatattatagtactactctttcaattcccaggaaattgtaaggtttagcacttcatattgtttcatttactaaattattttatacttcttttattccttttcccatgactatattttattttatatttatcacttaaatatcaattgcatttcattattgacttttatatttagtaagccttactgttctaattttacctagaattcagttgatttgctaataatgacatgccaaagtgaatcattattacacaatcaacagaaatattccacattattccgacatgggggcatacagctctatctgttcacatatatttatccattgattccttcttttagagaatatttattgaatacttattctgtcctcatgaacgttacattctaaccagagagacgtaatataactaattattccaatctttgttcagttataattatgagaaatactgttataaagaggcacaagatattgtgagcatttatggtccaggccctgtgggtcagggaagggtgaagaaggtgaaaaggaaggcagaagaaactgaagtgtgagggcttcttgatgtagaggaggcaatgagttaggtgttgtcagctacagaagagaagccaaattatattaatgtgtatgagtgaattcttacttctctcaaatgggacataccaaatcaatttggaaatgtagctggcaagtgaaaggacacccaacccagactgacagaaggtaaaaatggaatttatcagcccgtctgaggaatgtgagcctggagtagcacctgccatactggacctaggggcccaaacaatgtcagcagagctcactgtcatcaccacttcccatctctgccatctgttgtgtcagcttcattcttcacaggcttcccacaccacagtttaggtttacatctctaggttcaagtctaggagagaagagagatgcctcctttctagcagttgcagagaaagcctcagtgcatcttactgatcctgtctgaacatctgatcctgtgctcatccctgaaccagccatactggccagagaaatggagtgctctgatttactgaccccgggtcatgggtccacacctggaattatgggtgatttcttcccctaaatcaggatgccttactttatagaaggaggaaagaattctagacagcattaacaacagatgtccagtgttgattttgcaaatgctctgtgctttaattttcaaccttgttctgctccaatgaaatagagcttttggaaaagatttataaactagagataaataaatatgtgcaaggaaaataactttgaggtcactgaattccaggaaactgagatcactgaaattctgtgtcccagagtgcaatatttatttcacaactgtagatacggacacattcttagatactgctgttacttgtacctccctgatcctgaagccaagaaagtctgcagaatccttttcctctgactacagctaatgaggctacatagcttcaaatctgttcctctaatgtggaaaattgcatacattctaatagtattagtatcttgggttattaaatgctttcaactgaatttcttggatcttctgttgtcacagaaacatcataatacatagggcaggtttggaagaaagactggccacaaaggctttgagagcctcctcctatattcctaaaactacgttacagtattgcatgtgaagagatagggctatctatgacaactatgtcctgactgattgctaaggttgattcacatgatcttgctaaccaggccagaaggcagacagcttttagttcacaagccaactctgatcagttagtagtggctgactggagaactatgcttaagaatttcgagactatgtccaagctctggggaaaaagtgctacagttgattagttatgcctgccatgattacagcaataggaaggagtggcatgtgtgccacctgtttgtaatccctaaactgggaaggtttcccatttcttctgtttttcatatgcatttcttccatagctgtgagctaggaagaaaatgattcttgacctgtcacatattcactgccagggccagtgctagggtgaagaggcactcaccctcagggtcgagcgggtacaagatcagtacttccatggccctaaaagcgagtacctctctaaattttgtcttgggtttctcatttggttcaccccaaccatggtctctgcatgctctgctagaggctctaaacgcaatagtttatgtaaaggaaacaaatgcatggaaacaaaatgttcaggaagaacaaaaacacacacacagtaactgctgcaatgccatgaaaacttccttaatgaagacagcctcgcttgctgttgtcgtatgtcatggctgtttatctgagtcaactccagagtagcaacatacttcagaaaaacaccactgtaagtcagaggtccactcggtgaaacagggagcctagttaatgttaattgggtctttgccttttgaaaaccaggacaccagccctatgtcccttagggttgtttcactaaagtaactcagctgttgtgacattgaggtaagtgtcctttatacaaaatctcctaatggttaaaaagaaaaacgtgaggtttgaagaccagttgctcagtgcgcctcttctaaatgaatggcagacagatactctcggggtagaattacagacctagtttagtcacggtcttggtaaggatctgcacaccagcttcctcgtttccccattcggggttcctgtggtctcttactagtctggtcgccctgttctccaggcttatactgtggtctctttcagaatatttcttccaatgtgctggaggagtctgtggtctctgaggacaccctgtcacctgacgaggatggggtgtgcgcaggccagtacttcaccgagagtggcctggtaggcctcctggagcaggccgcggagctcttcagcacggtcagtgcccagagggcatcccggggcctggcctcccatactccagctggacttggggtgctgggaacacctggtcttaatggcccagtcagccccacttcccgaggacacgtgccagggtgtgcggggcaggggatgggcccggggaggactttgatgtatgcaaattgcatgagcttcccaagggagctgagataacctttcatcacagtgccgatctgagcttcactgtatgctcattggttgggcagcagtttcacagtattatttctatttaataggggtggaactaagccacagagaggtgaaatggcctgcccagggttacacaataaatgatgaggcatgttttcactccctcgtttttcctctcagagagaaaaaaattagggaggaaccactgggaggagagaggaggaatacacagacagtgtcttccctcctagccactgtgcagtctgaaggaccatcacagaccaggaccagcttacagaaatgtgggcacagaaaccactgagactcctctggttaacgtaatctggatctaaacactcctagtatatatactagaaaaatatatagagagatgaagtcattgagattcagggcaaagaggaaacactcttgtctattttcttttctttttttgagacagagtctagctctgtcgcccaggctggaatgcagtggtgcaatcatggctcactgcagcctctacctccagggttcaagcaactctcctgcctcagcctcatgagtagctgggattacaggtgtgcaccaccacactcggccaattttttgtatttttagaggagacaggatttcaccctgttggccaggctggtctcaaactcctggcctcaagtgatctgcccatcttggcctcccaaagtgctggaactacaggtgtgagccaccacgcccaacttgttttcattttaataatctccctcctcctttacattttaagccaagaaagtattcagtactttactatatttagctgacccaattttgttttcatctatactatactcatccttattttccagtttttatttccaagtttcctctctacaattttatttattttaattattgttttaactgtcttctctctattcttgctttccttttcaagattcagaaaatgtctaatatactctcatttttcctcaaactcaacaaaatgaattagaatcctactaactctttggaggcatacatttagcatctggctagaggaggacctctgatgaaatttaaatatactaaaactgcctttctgaattgctgttagtccctgctaccaaacttctctcctgttttttcttttcgttttgttttgtttttgtttttgtttttgaggcagcgtcttgccttgtcacccaggctggagtgcagtgatgcagccttggctcactacagccttgacctcctgggctcagcctcccacctcaaccgcccaagtagctgaggctacaggagcatgctaccacacctggctgattttttaatttttttgcagagatggggtctccctatggtgtctaggatgatctgaacttctgggttcaagtgatcctcctgcctcagcctcccaaagtgctgggattacaggcatgagccactgcactcagccagtatttttttttcccccgaaagctcttctccttacttatcgccatacaggactacttagcgaggtgtctagttcagtttgaaggctaccactgtcccaaaagtgctcagataccccttcttgccctgtgaaatactgtgatacaacaataaattcactctccagcacattgtttggacaatgacctctggttgctcttcttaagtttccagtggattaaattctctctgatgctcttctcctctttccaagggaggcttatatgagacagttaatgaggtctacaagctggtcatccccatcctagaagcgcatcgagaattccggaagctgacactcactcacagcaagctgcagagagccttcgacagcatcgttaacaaggtagccggggagcctggctggcaggtcttgttacctggtggcaggcgaccctgtcctacagatgcttagccatccttcctctccagggagtgatttatctttagcacattgcttttgctctcacctgtcaaacagaaaagggctgaaattcttctaacagaggaccaaaattccatatgtgaaaacatacagcttaaattactttataaccaggaaatgtgagaaatttttaagtgtaattaaaagaagtcccagaaatctttcatgggattccttttgttgttatttctgaagtttattccataagcattaaatttttttaaggagtaatttctgtttacatcagccataggagtaaaatgctttgttaacacaatgagagacccctgccctttgcaactcagtggctcctcaggatgacataactaaggagagctttttatattttgttcctcaggatcataagagaatgtttggaacctacttccgagttggtttctttggatccaaatttggggatttggatgaacaggagtttgtctacaaagagcctgcaattaccaagcttcctgagatctcacatagactagaggtaagaaaagtgattctgtgcgcctgacctggtacactttacaaaaacaagttagagtgggtcatcaccaaaaataaacaaataaagagttatggattcatcattgatctctacataaagttttcccctttgcatttataaaaggcaaagtagaaaggtattaggtgagatcatgaggtgatgtaatattttgatagtttttccctaatactctgtgtatgcttttcacagtttggaattttatatggtgaatatttattttgaagtctgtgcaaaattcaatcaaggtcatgtgctttcttatcaccctttccaaatattagtagtttatactagtagatagagagtagtagagtttttcaacatgaagtttagcatcttgactttgaagtaatctagccaaatgactgaatcacccctagataatggtgaggccatcctttaggtatcactggatggcacctggggtccttctgatgtggagctactcagctgtggccagcccggctccaacctgccagtgagtgacatttggtccataatacaacagaaaagtgtagcatgttgttagaagcaaagctgaaagcatggagaaaaagagaaacagcctagagaaaggtcaggacaaaagaaacacaggttataagggccaaacactaagaactcagtcaaaggtgcctccccgatgggatttggatgaacaggaatttgtttacaaagagcctgcaattaccaagcaggactggggtcctttgaactgctcacaattaaccaaagattcactccttaggctttcattgctttgaatttgtgccctcctatgagtgtaaaacttaaaacatttgtgttgcctaatggcttcgtacactctccatccatgccaaaaaagacaagagggtttatccttacttgactcaaagaagccattgcccagggtggctgggtgagttgccccaaaattgtttagcacatgagaaaaagagctagcaattgaccccagtccacttggttccctatattgtttcccctacttagaattagaggtatatattttatcttcttgtgcactgtgatttgccacaatatgggaaggctggtgacttccaagttcccagggtacagaaggcgagaagtaaagagtgtgataccccaggagatacctcagcaaatataatgatgttagctgaattagaggccaagcatacatcttatagggaagcatataccagttgacagtgctatttttatttttgtcttaggaaatgctgaactttgctcattagctcagaggaactctcaataatcagtgaacatcattctaccttgcacttgctccaaacttatttcacttccaagaagacaaagagttgcattatgttaaaataacctttataaactgttggttcttcttacctaggcattttatggtcaatgttttggtgcagaatttgtggaagtgattaaagactccactcctgtggacaaaaccaagttggatcctaacaaggtatacaaaaatttacaaaaactaaccatcaagctctaaatcccttcgttctctacccaagaatacctaatgatctcatctatctggactctccaagtcacttaaatgcagtcaaaccttttcgtctagagttcaactactaattggtcagatcttaaagaaaatatagtcaaaggcaggaatcataataggagctaccacttattaagcaccaactgtgtacctggaactgcattaggccctctacatacatcattttatttcatcctgcaacgacccctggaagtagattttgtcattcctattttagagatgagaaaactgagacatggaagagtcaagcaagtttcaaggtcatgcaagcagcagagccagtactcagacttgaggtctgttgcttctgaacccctactcttcagcactgctctttactgcctttttataaaacctttaaactctccatttcaaactcgacaacacttagtggcttccttctttaggctgcaagtattccttccatccaagtccgggatcactgtgctgttgggggaatggtaaaaacggcttgggtttgggtttcctcactttcacaagagggtatgttccatttcaccccaaaatgggtgtacagttctgatgctaacacgtggaggtggtatcagctcccacagggtaaaggctcagtcctcctcaagactgccctgacttcagatgccagcttcaagagggacccccaggccagccacgcttctgatcagccagctacaaatttgggagtttctataacctgttagcttgaaaataggagaaaacaaagcaaataataataataataataataataataatttgggagtttctatgatacctgttagattaaataattcactacaatgactcacagaattccaaaaagtactctggttactatcagagtattatgataaagggtgaacatctttttgtgcctttatttatggcttcctggctcatcagtgtgttctccaaccaggaagctccgccaagtctcagtgtccagagattttgttggggtttcattatgtaggcaaattgaatacagtctccagcccctctcctgtctccagaggtcatccagttcctaccctgtaatcacagaattggtctttttggtggccacttggcatcctgaagctatccaggggcccagcatgagtcacctcattagcatcacaaagacacccatcactgaggaaattctaagtgtttctaaagctctgtgctaggaaatggagacaaagaccagacatattctttattataccacaagctgatgctgcccactcagcccaactcacatgtccatgaatgagctttctaagttactggaaatagtgcaagtgcaaggtatcattaagggccctgggacagaggaccattcaccatctagcaaacctataaaatgaaaggtccaaactcccagttccatcttccaggatatgaagaagataatggaagaggggaagaattggccaaattgaagagtttgtttttctacatttttcagaatgctttctcacttaagacacattccctagcctcggcttgaaagcagtggctgtggtaagagtttaactaatcttcagacacacatgtctgggagatggagttggccgtgtgcccacagtgatctgtacatagcacaagctgtgtaaaatgtgacctccctcagccaaggtgcccttttcccctcttttaaaattcccagggtaggttgtgagagtttggaatgagagtctgaacccagagttacaaccagatttcattatactaagtcgtgatttacagtctgaggtcagtgaccccactcatccctttcagtgggtgagtgtcccagcatctgaactcatggtcactttttttcctaagagattgtcgtctttaatgagtacttattcgctctgtgtttgagggtggaggtgatgtgagtgtgtgtttaaatgaggcctaggcagtaaaattcagttttggtgtttagttctatgagttttgacaaacacatgtgactaccttcataaccaagatatagaacagatccaccactccaaaatacttcccgtgcccattggtagtccatgttgcaatagttccttcctttccgttgctgagtagtattctgttgtgtgactacctcaccatttgcttgttaattccccactggagtgacatttgggttgtttctagtctttgttatgaataaagttgctggagacatttgtgtacaggtttttgtatggacataagctttcatttctctcctgtacacacataggagtggggttgctgggtccaatggtagtgcagtttaactgcataagagaccgccagcttcttctgcaaagtagctgtgcattttgcattcccaccctctgtgtatgacagctctagctgatctccatccttgccagcacttgatattgttagttttctttagttcggccattcatgcttcctcataactgtgaggtagtcattgtcattctgtaaaggaaagtttgtctctttggaatagcagtttgcaaactctcataccaaggcttccactgtggatcagtttgctctgctaggaaggtgcggccggtggccctcactctccccacaggcacattcccctctccctccttgcagccccttctgtccttgggggtggagaggaggaacttctgctggccacattctcccctgcatctgtagcttttctgcactgggcagggcggtgccggcacgccgtgttcctgcatgcccctccattgcgtcagggatggccgtttgcagaatagctcatcttctccctccgtgccttttcccccttaggcctacatacagatcacttttgtggagccctactttgatgagtatgagatgaaagacagggtcacatactttgagaagaatttcaacctccggaggttcatgtacaccaccccgttcaccctggaggggcggcctcggggagagctgcatgagcagtacagaaggaacacagtcctgaccactatgcacgccttcccctacatcaagaccaggatcagcgtcatccagaaggaggaggtaatgcacccaagggattggccaccactggatgagtgggctgggtggcctcccaggaggacccacaaacctctttcacagtggattggactgaaaacaaggagggatgcacttgaaatatgattatatggttgtcctttcactctcatagtgccagaaaatcccatttaggcagctacatattttatagcactattgtatattaaatatttaatattttaaagttatatctttagtataagtgtgtttatgtatttaattataatatttaatatatatttcaattataaacttgtacaacagatatatttaccttttaaatattttatataaaatttttctatatttcaaagcttagaggtgattcaagcatagtcgtgctgttaattattggagacgggacctgcacgtgggcagccccagtgaggcggtggtgtgctgtgggaaagggccgtgtaaggtagacaagttcactgactagcttctagtcctagcttcctcctgtgattttaaacaagctacgtaccttcagtttcttcatctatgcattagcaggaaagacctctaagtacagtacaagattatactcattttattaataaaaggactggtcaagaaggtctctcaaaccacagaattgttcaaaattctacacaccataaacaacttattattctttaaaacacatatatatacacttatttgtcgtcctttttatgcagggccacagacttctctgtgactgtgggtttgctgatcacaattcagcattttcttttataaaccacacccgtagtgctttgtccatgattttcagttttgctttgtgtaagcagagtgagagcttaaagatccttgttaaacaatttgagagcagaagccttctggatgtttatgatgtttttctccccgagactttgacagcagtcttgtgcacacctaatatgacaggaatttttatagcaactcactttcataatatcttgtccaaccatttggcttggttttcatagaaagaaatctttttctttccacacccatggttcatcagtttctccattatctaattagattgggtcattaaaataacaagtataacaggcataatcaagttggtgaacaaacacagatgaattgtggtgaatatatacctcatcaggcagaagcagaaatagctgagctaactggagagtcatccagcaggtagtgttcagctgggtaaccacatcagggtgtggctttcacagaagctgaagaaagcctgaagcagtgactcagtcgggaggaggtgggtttagaagccatctgctgtacttcctatacttcttggtttggacttttgaacactgagacattctaggcataacacagatataaactcatggtgcccaaaagcatttcaaaaccttttcttttcttcattcctgccttcctttcctttccttcctttcctttcgttcttcctttttttctgtgtctctgtctctctttctctctttttcatttttgagacaggatcttcctctgttgccctagagtgcagtggcatgaacatggctcactgcagcctcgacctcctgggctcgagcaattttcctacctcagcctcctgtgtagctgggactacaggcttgtgccaccatgcccagctaattaaaaatacagagagatatatattttgtaagagacaggggtcttactttgttgcccagtctggtctcaaactgttggcctcaaacgatcctcctacctcagcctcccaaggtgctgggattacaagtgtgagccactgcaccagcctgaagttttcttggccttccttcgttccccaacaacctcaacaacagttctcagctgtttgctagggctgtagaacaaagttccatagactgggtggcttaaacaactgaaatttactgtctgcacaattctagaggctagaagtttgaaatcaaggtgccagcactgttggtgccttctgagggctgtgaggaaagggtctgttccaggcctctctccctgacctgtggacagccctcttctccctgtgtctcttcacatcatcttccctctgtgttcgtgtccagatttcctcttctcgtaaggacaccagtcatattggactagggcttaccctgctggcctcattttaacttgattgcctctgtaaagaccctatctccaaagaaggtcacattctgaggtactgaaggttaggacttcgacatatacattttgggggaacacaattcaacctataaaattcagaaaagactctaccccaaaccagcagaacttagcaaatagattgattgacccttaaaagaattccatttactggaaattcaccctcagttggagaaggcacaggtgatatcaaaagcctgtgttatgatgggggagaaaatcttgagtgctgtgcttctactacagctttctgcattgtaagttgagtaacatgaggctgtgtgcggtggctcttgcctgtaatcccagcactttgggaggccgaggcagggggattgcctaaggttgggagtttgagaccagcctggccaacatagagaaaccgcatctctactaaaaatacaaaattatctgggtgtggtggtgcatgcctgtaatcccagctacttgggaggctgaggcaggagaattgcttgaacccgggaggcggagattgcagtgagccaagatcatgccattgcactccagcctagacaacaagagcaaaactccatctcaaataaataaataaataaataagtaagttgagtaacttgctcagtaataggaaaaggcacctgacagggtagaaaaaacatggactttgaagatagacatacttgtgatcgaattatgacctcctcccttactacctgtggcattctgtggaacttaaccttacaaatccccctttgactgtaaaatggagagtataaagaggttgttgagaggaataaatgctaaatgtatgtaaagttcctggaacataaggaatcaagaaatgttaggcccatctttctttttaacctgttaagagtattttaaattactctgaaagtctttccctagctgcctcttcaaattcaggtggcctctctgtcatagctccaggcttgtccatagcttatgagaccagacagtgacttccctatgtttacgtctcatgttcagtttgttttgacaccgattgaagttgccattgaagacatgaagaagaagaccctgcagttagcagttgccattaaccaggagccgcctgatgcaaagatgcttcagatggtgctgcaaggctctgtgggagctactgtaaatcaggtaagcaaaaccagaggtggcagctcctctggttcttattatttaggttgtcattatacgtctgcacccttcttccttggggttgatgaggactttgatccatagacaaacacagaaatgttcctacacttaacctgaacacctgtaaggtttagaagacttttaggaaacctcttccctttcatgtaacaaccccaggtaaaaaagaaatcctagagatgagtggaccaggctttaaggagtaccactttctcagaggagtctccacttcggggccagacctgacaatatgatgcaaatctggagtcatgttgaagaatgcttagtcatgaccaattcacgcagagtaattgcagggcttgagactcacctacaaatgcctataggagagaaggaaaaggatctagaacatccaactcttggctcagtcagcagatgaacccagcatgccaaggaccttgacaaccaggaatgacctgggacctgacttcttaggctacttcagacaagactagatcttcctatcagacttcttagaacgctgactcccaagttcagcatggtgctcaagcagtctcagatgaagggaggtaccagcctaatacctctgtccagtgggcctccttaattcaaatctagatctgttcttgtccacacttccacggcagttattcagtgagcatcatgagtcttttctcattcagcgtaattggatttccccacaaaagttctgagtgtacttgacatcaagggagcagaaacagagaagagaaatgcctattacattcccaagatcaggaaaaaaaaatgaggaaacgtttgcctttgtaagtgccaatcctttgataaaatggaagactttccaagcccacaaccatggtctatctgtacacgatggatatctctgactcaatccagcagttatgcaaaatgatgtttgccatgaaggcaactagataagtgaacaaaaatgaatagatcaaggcaatcctgatttttagaaaagcaactcaaagcacataccatttgatgtagttgtattacacttatatatgaatgaaaatctattattagtagtatttgattgataaaataatattcggcgccaggctcagtggctcatgcctataatcccagcactgtgggaggccgaggtgggtgaatcacttgaggtcaggagtttcagaccagcctggccaacatggtgaaaccccatctctgctaaaaatacaaaaattagccagtgtggtggcaggcgcttgtagtcccagtacttgggaggctgaggcaggagaatcccttgaacccgggaggtggaggttgtagtgagctgagattatgccactgcgctccagcctgagtgacagagtaagactctgtctcaaaaacaacaataaaaaagaaaataaatttgggctgtgtatggtgcgcacgcctgtaatcccagcaatttgggaggctgaggtgggtggatcccttgaggccaggagttcaagaccagcctgggcaatgtggcaaaatcccatcactacaaaaaaatacaaaaatagccaggtatagtggcacacacctgtagtctcagctacttgggaggctgacatgggaggatcacttgagcctgggaagtggaggctgcagtgagcagagatcatgccactgctctctagcctgggtgatagagcgagaccctgtctaaaaaacaaaaacaaaacacacacacacagggaaaatacatttatacttctgagtgttcctctaaaacttcagattcctcctaagaaatcaaaatttcctgagatgtccaagaccttccttatttttttttgtttatttcaaaccaactacaaaattaaatgttcaaactaagaagtcactccaatattttctcccaagcaatttaatttccttcatatatgtatgaatatattcatatatatgtgtgtgtatatatatatacatatatatgcatatacatatacatatgcatatacatatatatgtatgtgtatatatatatgtgtgtgtgtgtatatatatatatatatatatatttttttttttttttttttttttttcccaccagggaccactggaagtagcccaagtgtttttggctgaaattcctgctgatccaaaactctatcgacatcacaacaagttgaggttatgctttaaggaattcatcatgaggtaagaaggaaaatggctgggaatttcagtagagcagtggttctcaaagtgcaatcttagaccagcagcttcagcatcacctgagaacttgctagaaagacaaagtctcaggcaccctccagacctgctgaattggaatctctggaggtgtggctcagcaatgtgcagtttaacccgccctccaggtgatcctgatgcacactgaagtttgaggaccactgcagcagagcaacactacttgaactactaatgagtaactaacacgtcaactatgaaacgcttttgtggctagcatcccgtgtgcctcacaatcacttgttgtaaaacaagtatcatcatcttcctcattttacaaaagaggaatcagaggttcagagagaggagataattttacttaaggtcacacagacagttggcagcagagatgagctcaaaccaggtcttctgaatccaaatagtccacatgtccatcaatgtgctgatattccactgatgcactagagtcccagaggttctttgcattggcagtcattgtaatgttacaaatcttataatatcttatttttagaaacttaaaaacatacactgcctcaaattgagagaggcaagttctaaaaccaggcttttcaaaggtattatcctgtgacagttccccatgtcagacaagtctcatctctgttccttaattctgcagtggagctggcttcaagagcagtcagttaggaactgggtctttggtcaaagccttgtaatttattgcaatacagacagatatattgggtctcctatggtcctaaaaatatgagtatgaaggatgtgatggcatttcacctataagagaaaaggacttcagaaaaatgtgtagcaatatttctttctattcaaaaccttagagaagaatattaagtataagaatatcttcacttggcagatggggataaaggagactaaaagtttgctaaattcagtgaaaactcatcaaaatgctagcatttgtgaggttagagatatctcctccttcacaggcttttgcgagaggtccgcaattttgctgcatatacaggagacacactgtgccctgcagtgaatcacagccgcttggtaataggatgtttgtgtggctttgcgtgtttgtatttgtgcatgtgtgtgaacatactcacagattatcttgattaatgttttgatatttgaattgtttcctgtatttgacaacaattctgacagaaaaactagttgttgttgttgttttttcagtacataatacgtatcttttaaaaggctagaaaaatatttggggaattattttattattttattttattttgagacaaggtctcactctgttgcccaggctggagtacagtggcataatctcagctcactgcaacctccacttcccaggctcaagagattctcctccctgagcctcccaagtagctgggactacagacgtgtgccaccacatctggctaatttttgtatttttggtagaaatggggtttcaccatgttggccaggctgatcttgaactcctgacctcaaatgatccacctgccttggtctcccaaagtgctgggattacaggcatataccaccgtgcccggccctattttttattttttgtggagacagggtctcactatgccgtctaggctggtcttgaattcctgggctcagagattgggggcttaaaaaaattttttttcatatatttttatttaaaattcattatggttgaatgcttccaaagttgactatgccccaggacctctaaaaggacctatgaaatgtttgaagagcactcactatattccaggcatgatattagttatgggactacagagatctggcttgttcctctgttcttaatgacaggacatagccctgcatggctgaataatagaatgcagcatatgcacagaactttaagaatgactaactacaggactataaagatcagaaaagagaaatcagtttcaggctggagcatttgtgggaggcgttatggaaaaacaccacttaaatcttgtcttgactatatacgtggaagaaaggcgctagtggggaagagggagccaggacagtggccctgcctgatccaaggtatcactttcagctgctttagttacccatggtttgaaagtattacttacaatatgatattcagagagagagagagagaccacattcacataacttttatttcagtatattgctgtaattgttgttaatctcttactctatctaatttgtaaattaagctttatcataggtatgtatgtataggaaaaaaacataatatatgtagggttcggtaccatccgcagtttcaggcatcccctgggggtcttggaacctatccccgagaatgaggaggactgagtaccactgagtggaccagcaggaccacgagactctgtcaggaatgcctgtgatgcaccgggttcctctaagtccagctggagcagcgtgttctcatgagcatgctaggacaaggaggaaagattggaaatatgataatatcagtaaatgaggctctgaatacaatttaaatgtttaagaaaacttgtcaggagagtgattttcatttacttcagtttgcctcaattttttctactagttataaatcttgcaatccagtatctcacgggtatgatcctttccatgacaccacctaggtaaaatgtacttacaaaatccctactaaacatgcgtttctcattagctcccagccccaggaaaagttactccaaaaagaaccagtgcccagtaaaactagtcccaggcaagagatacaagaggaaatggactttcctaggggtcgctcctttaacaaagtcattagagtttcaataatgaggctatcattctccccagatggcctacagaaatgttggattttcaaaatcaaattcaccattttaaagttgttctcctacccttttaatggtgattccacatgggaaccagtcccacctttctccccactggctgggctgctgcattgttctaggaggccaggagactgtccatgcttcccagacttcactgttcttacacgtcacctgaggatttgtcaaaatgcagattttggcctgatgcagtggctccgcctctaatcccagcactttgggaggctgaggtggaaggactgcttgagcccaggagttcaggaccagcctgggcaacatggcgaaactctgtctctttaaaaaaatacaaaaaaatacaaaaatttagccaagcgtggtagtggtgtgtgcctgtagtcccagctactcgagaggctgaggtgcgaggatagcttgagcccgaggaggtcaaggctgcaatgagccatgatcgtgccactgcactccagcctgggtgacagagaaagaccctgtctcaaaaaaagaaaaagaaaaatgcagattctgattcagtaggtctggggttggtcctgaagcactgcatttctaacaggcccccaggtgatgctgctgctgctacactggaccaaactttgagtggagagcctgcaaagattgcttaatttcctccctttcacatttctccctattacctctccctccttccctgagggcttaatctcttaggccatccttatcatcatttaccacttttgccgtctgcttcctcccaaaaaataaataaataaataaataataaaataaaattttaatggcaaaaaaagaagttgtaaatctcaataaaattatgtgagaacaaaaaaaaaagcaaacatgctcaaactgctgcaccttgaaccaactatagacgtcagttcatccattcattcagcagttattgagctcctactttgtgccaggcactgtgctacatatgtggaaggatgaagtcccaatatcagtaggacaaggctacagacaaaacagtactgctgctcattattcatctctatgtgcaaacacaacagatggcctgccctccacttcattctacagagatcagaagtcgtgggtgagagtgtgctgatggtgcacaactgtgtaaattactaaaactcatcaaactctaaacataaaatgggtgaatgttacggtatgtaaatcataccctgaatacagatagtagatgaggttcctctgttgcttaattgcttctcaagtccaatctggaagttacagcttttaatgaatagagtaactattttttcacgttgtttgtgctgtgtattttctcctccactctgctaacagacagcagaggtgacgcagaagtggaaaatatttggggcttgaacagctctcaggtttcccctttagtaagctccagcttctcagcagacttgggctgtagatcgataagcccagatttccaaggtgaccataaatgagtctctgttgctgagagctaatagcggaaacatttgcttgccaggtccactgcgtctagtgccaccacggggcagcgacctttctgactcagctgtagtggaagcagaaacagccataaagaatcctggcagcctgatttgctgcagccagtactcatccagccagtcctgcaactcttcaaactgttaccaagctgggacctcaatcagcttctgtcttttcctgcaataataaaaaacatctcgggttcagaagccaagacaagaagatagagagatacaatcttctatcttcctcttctgctcccccaaacaccccgaccatttagatttttaaattttcttctttatacttatctggactttctcattcttataaagactaagtgatgttaaatttgtttttaatttaaataaaagatagtagtactcactggcaccagttacagcttgcctttaagagaagtagtttcagatacaccctgaaagggttctgcagcatatatgtggtcataggctcagaaaacaggctgttgagtggtggcgtttttaaactggagttggggtctatgaagaggaaggagaaggaatttgtccgagtagccaaaggacaaccaaatgtgtagagtgtaggtggaaaaagaagcagtagttttaacttgagaccaaggccatatgcctggcttatagctggaaatggggaaatggctttcctaggcagtatatgtggcgttggggttgggaatatgggcactcaagccagattgcctgagttcagatcccattctgcctcaactagatgtgtgaccctgagaagttacctaccctcggtttccccagatgtaaaatcggaataataattgtacctctcccttgcagttagtgacagaataaaatgagttaatacatggaacttagaataagacttcatacatactaagggatcagtaagtgtaacattgttcagtggggcaaataggggactgatggatttgagtgggaaatagagaattaatctgacttaaatacggagattgtctatccatgatttgtctgtctctataaagtttgaatcataagacacagtgatgctgatgagacattggcctgggagcagcaggattctgggtttatatccagctgtgctgtcccacaggtatgtgactggacagggcacttcacctctttgcatgttagtttcatcaactatgaaataaagagactagaatacagcatctctaatagtttatcattctcatattgtacaaatagttcatttacttagcctgggtctgtcaggcataataacgctaccatgtgctctggcttcagctgtgtgcagggactcttctgaacatttgatatgtttcaactaatttaatctttacattaatttatgaggtaggctcttatcacccacacatcacagatgaagaaactatgacatgaagaggttaagtagcttgtttaaggttgcaaagccagtaagcagcaaagcgggattcagagttgagcactctggctccagagtccatcctcttaattgccatgctgagctgttccctctagtgactatattcagttgctagtaacagaaggaagagtagcttaaataagaaatttatttttctctcacattaaataagattggaggtagtcgatgtagagctgtgtagtggcctcataaagtcatcagagaccctggttcttttccaatcctttgccatgccatcctggttctagtgtacccattctcgtggtcatgatatggttgctagggctccagccatcatgaccacatctaggcaagtcaggagtagaaatgaggaaacagcaaaaagatgtgcccatttcccagtgccttcacctatattatcagcgatccctacctgcatgggaggctaggaagtgtaagttttcaggtggtcacactgcctggagttctgccagtagggaagaaagaatggatattgagaaaacaactaacgaatgtttgtctgccacactgaggaacccatgtatgggctgtgctgaaaaaggggggccaaggctgggtacagtggctacgcctgtaatcccagtactttgggaggctgaggtgggcggatcacttgagctcacaagttcgagaccagcctgggcaacatggcaaaacctcgtctttacaaaaaatacaaaaaaaattaaccgggtgtagtggcgtgcctgtagttccaactgctcgggaagctgaggtgggaggatcacttgagcccaggaggcagaggttgcagtgagctgagatcatgccactgccttccaccctgcatgacagaatgagatcctctctctaaaaatagagggggtaccaagagatgcagggggggtgagggcagcatgactactctctctgtaggagaccttaactctataaatggaggccccaaaatgttactgccatcaaaagccaggaatccttttctggaggcgtaacttcctgccctttctaatccctatcaatctggtttctgtagaactgtgactgctagaaaaccccaggcatatttgttctaagaaaatacttgtgttcggtgaatttaccaacaaagggagcatcagaggatgtgagggaagtctggaatggttgtatcactaagtgagagcagcacagatgtttgtggacctattgagaatgttacagataagaccatttttgaaaagttgtttgcagtgtcattttatgatcttgtgtacattttccaagcgatgtggctattctctaggagggatagtagaaattatttcaattttaatcaaataacctagagaatataacccaaatgactgaaaggaagaaatgtagaaaaagtatataaaataattttttgcattataaaagtttaaagacataaagtaatattactacataaaatctaagttttttactccagctattaatatgtttttctttataaaacatcacatttattaattgctgtgtaacaaactacctcacaatttagtggcttaaaagaaaatttaattattatgcatgtggtacataataatttttgctttcctcatttctactcctgatacttgcctatgatgtggtcatgatggctggggccctagcgaggtgtattgtggccatgagaatggttttgctgcaacttggggttggctgggctcagctaagcagtttttgcctggagtctctcagttgcactgagacagtgactaggacttgaattacctgaatgcttcctcactcatgtctggtgtctgggctgagaatactcaaacagcaggggctcctcctctctctaactctccttctctccacatggtctctcctgcatgacagctttagggtaactagacttgtcacaggatggttcagaactcttatagtacagaacgagagagagacagaggccatattaccttttattagccagtcacacagtaccacctccaccacatcctattcagtgtggctgtcacaaagaaccatccacctcttgatgggggcatgggcaaggttctaggagagcacattcttgtggccattttcagaaatacaatctgctacactccagaagcatctgtttgccttattatcatagcttctgatttaattctcccagcaaccctaggagattatatgagcttattatccccattttccagagaaaattgaagatttttatggttaagtcatcctgctaatgagtagcagcttgtttcaaccgcagttgtctgcatataacacatttaactcagtcaagggcacatggtgagcaatcagaaggtgttagctagctgctgctacttctgcaaacaaagactaaggagagtttagctgattttaccaaagttgtccgagtagacttccccaaattagctgttagctttggcaggactcatcccacctcctgtagcctgccaatgttataaacttgggccttgaagtcatcctgaaactgatcttattttacacatggtggtaattgtaactgttagttaagaagcaataaaaaaataataaggggtgatatagatttctcaggattcaaaggccatatgccttcccttctatttcttccctaaaaccgttaattcataaccttagctatcctataatttgcttcaattaatgacaaacataaaagataggtgaaaatccagttaagggagttctttcagattctgtgtgagttaaatcaagtccttcttctatagcaggctaattccatgatgaagctgtggtgctaagtttatttttgcctaggcaggtagctcttccttgccacatgctatcctcttcctctttgactgtcatcctgaaaatgtgttcagtgttaagaggatttgataacaatgtctgggtatctccataacttagtccaaatctggtaccactgttaggaaaataatgtaagccatattgatcacccacgtcttattcatttgaaggataatatagttattactaattattgcgtgttaggtaacatacagccattattctgtccctttaaggtttattgatttgtaagttcccttgggtagaagagtacaaaacaaaaggcaaaacttcatcatgtttaaataacgtgattttcttctttggtgtgtaccgtaccgtgcaggagacagggaaaacaccaggtttaacggtccacaagccagataaccatgatgagttctaaagattttctctgtctttaatgttcttcagttttgtcatgagaagactggatatagctctgttgttgttcattagaggatttatatctctcttcaactctagaaaattaccagctgttatctctttaaatattgtctccctctcattttccattcccttggagattctattagatgtgggttggatcttccttatatctctatgtttcttaaccaattttttcatatttttttattttttaaatctcattggtgatttccttggatctgtcatacatttacttctccaattatgtctagtctattatttaacctttaacctttccattgagttttttgtcttttagcaactgcatttttttttttttttttttttttttttttggtgagacaaggtctggttctgtcacccaggctggagtgcagtggcatgatcttggctcactgcaacctccacctcccaggctcaagccatcttcccacctcagcttcccaaatagctgggactgcagtcacctgccaccatacccagctaatttttatattttttgtagagatggggttttgccatgttgcccagtctagtctttaacttgtgagctcaggcaatccacccaccttagcttcccaaagtgctgggattacaggcatgaggcaccacacccagcctagtgactgcatttttcttttttctagaagttctgtttggtccttttctgaacttttcctggtctcttttttcattttccctgtttatttgtttttatcatggattttataccttttatttattttctttttttttttctagttacatgattacttaggattttatacattttattacctctctatattaactttggttttttacattgttttattatctctaattcttattggactaattcttttgtttgatgcatctgttagttttccctcgtggtggttggtttcttcatatggtttgtaattttttattgtgagctcatctttggcgagagtggctcatatgccctgattgagaatgtgttcctccagaacaactttatgttggtttggctgaatcctagcaatttcagtaatcttggactggcttttaagttattttctcaccttgaagcacatacagtcaaggaatgtacatttgtaacttatactatgtgtggtgcaagcctagaatttccatttctcaatatgactttcttttccataaatggccctaagctgatagcaagttttcattctgcctctctggacatcttgcagcatttttctaaaccctctttcatagatgggatagcttttcaaggctctggacgatatgcaggtggcatatccagaatctccctttgccctggccaaggccacatcactaatcttgtgtgagctttgaagccccttcccctcagcccatagacctatacacagtcctaaaatcttaatgggcagtcctactgacagctgccttgtcaccagctcctgtgatcattctagctttgatttttctctttctttctggcacctggtgttcccctttctctttcaacaagtttttgctgtgctttcctagcacttccatatgtacgtagcaggaggaggctgaatgccatctgctctgtctgccatgttgctgtaaatcacagtgagttttttgtaagtgtaacagcttccattctgcagtgtgttttgagtctgactcttagatccatcacttcctcacagtgttatcttgggcaagcatcctaacatttctgagtttcagaaacaaaatagagataaatgctgactttttagggttgttgggaaaattaaacagataatgcatgtaaaacttcttgaaacttcttctggcacatagcaagtcagaggttctcaattctggctaggttggcttcagtatcccctgggcaactttttaacattagacatttctgggccagaagcaatggcccacacttgtagtcccagctacccaggaggctgaggtaggaggatcactggggcccaggaggtcgaagtttgccatgagctgtgatcatgccactgcactccagcctgggtgatagagtgagccccgtctcaaaaaataataaaataaggtaaaaaaaaaaaacaaacacagagatttctgggtgctacccctcagcagttatgattcattaagtctgagatagatcccagaaatctgcattttgaaaagctccacaggtgatcccgatatgccacccagtttgaaaacgttcttaaagttattcgaaaaatcgtaagtaatttcattgttctcagatttctaagcacttcaaagtcatttatttctcccacactgatattttcatctcagatgtggtgaagctgtagagaaaaacaagcgtctcatcacggcagaccagagggaatatcagcaggaactcaaaaagaactataacaagctaaaagagaacctcaggccaatgatcgagcggaaaattccagaactgtacaagccaatattcagagttgagagtcaaaagaggtaagaacagggcagaggaggcctcttcctgtgggataaagagcagcgcatggggcctagcaccttggggcatgctctgctgcacttggggagctgcagaacctcgaaagggtggaagagggtcccacagtcagagaggctaccagagtgtgattcattctgcctctgtcctccccatccctgctccttgacctctcccagacaccttggtgttggtcttgtgccagggtattcccagggctgaatgatggcctgtgttggtttttttgtttgtttggttggtttgtatgtttgttttggcacagtgtgaaggggtcgcagacctttcacttattatttgctgagttgtccatgactgatgtccatttctactgggtgatccacccccaaccctttctaaaaggctaactgatcttttcttgcttctgtacgctctctttccctctcctccctctcttttcttaatttcagggactccttccacagatctagtttcaggaaatgtgaaacccagttgtcacagggcagctaagaaaagccatcttcattcgtggagactgtggccctgcaaccctggagaaggacttgctggtacttaaaaaatgggacatttgccacccaggactgactgtacactccctgatcagccagcactctggaagctttgggatcccaggaaccatggaattattcccaaatggactctgaccagatttttgccatactggggggtggcgggatggaggatgggtactcaggcatgactgcgtatttattaaagtgtgtttttccacaatgtaccaaacaaggcataagcagcttctcctgctgactggcca

SEQ ID NO: 15561 - DNA, 39876 bp, Homo sapiens
aatttacgcgccgtgtaactgtgaatctttcaaaggtatgttttactggagtgatttctggttatttcagaaggataatttgtgtgttgcgtcattaatgaaatagtagtacgaaaaacctatagcatcttttactgcaggaggtaactttccatgccattttttcagaaaatctacttatgacttcagtggcttgctagactggcctttttatttgtacttttcctgtgtttcagaattgcagagtataataaaggcatgtcaagtgcatattgtgtccattttcaggtatattagataagctttacaccaagataaattagatatgcttattggtttaatttgtgctaatatatatttaattgaaaaatcaaaaaaatttttttaaattgactgaagttgtattccaaaacatgcaaaatttagtttaaaatagattggatacacttttaaattttaaacaaggtagagggtttagtgctttgcttttttaaaaagtaaatgaaggctgcagctttctgcagtagttgtcttgggaagtagtgtggacatcactcctaagagacgttaaggaagtttagctaacaggctttaaccctttctctccataccagcttttactcttttttttttttttttgagatggagtttagctcttgtcacgcaggctggagtgcaatggcaccatctcggctcatcgcaacctctgcctcctagttcaagcaattctcctgtagttcaagcaattctcctgcctcagcctcccgagtagctgggattacaggcatgcaccatcacatctggctaattttgtattttgagtagagacggggtttctccatgttggtagggctggtctctaactcctgacctcaggtgatccgcccgcctaggcctcccaaagtgctgggattacgagcatgagccaccatgcccggccaccagcttttactttaatgccacagccttaaattttctttcaggagaaattattttatgtaaagttacaaaggaaaataatgcttaatatctgtaagcattcgtttggtaagtttgctgcctcctcagtaagttttgatgaaagtgaattttgatgaattactaccttagccgggtagtgacgttaacatgtggcttagctgtccattttctaagatatcaagaaaccagcaacaataagtaaaattgttaaattatgcaagaatcacatgttcctacctgtcatcatttagtcttggttctatttgcatgtgaatatcctttagaatatattactcccagttattccgctttacttttctgaatctcttttcccatctcttgacttcaacttcagtatatggctcttgttccttctacctggagaacggaggcatgtggaagcccagaggattgaattcttttttttttcttttctttcttttctttttttttttttagatgaatagtctgcttaggaaatccatctccataatgtttacctggtatcgtgttgtaatgtcagaatgaagtggctgttcttccccttgagtcatcgtcccgaatgaaggttccccaaaagaaatcatcaacttatgtggtgatttccttttacctttaaaaaaaaatttcttttcatggaaagataatggaacatgtcggtaagattcatttctaggaaggcaaaggagtagtttatcatctaaagactctcaacctaaagctgttttagaaaactttccttaaaatgagaagccgtaggttttcgttgcattattttggctaattgaaaaataagaccaagtgcgttctgaccttcgtttctcttacctttatttttacaaccaccatttcaatggcccacttgctgatacaaatgattgtttaattttaaaaagcatttaattgaagtcaagttatttagaacctaatcatttacacgtctttgttgttgctgctgttttgcaagagtgaagagcttggagtcaggtgaatctgggatgaggtacagttgtcatttattagtcatgtaatttgtgacaagccacttaatctctctgaagacttcagtttcttcatttgtaaaattggcataataatgctgtccctagtagggaatatagaattatataatgggtcctttgtatatattggctagtattgctctcttacgatttggcactatggagacactgtgggagattaaaagaagatgatgaataaaaggtgacttcagctctgaagggctttatgatccatttgggagaacaggtaatgtagaatatactggcttcaaaagtggcaggtgtttagaagagaaaaggatacatgatgtgataggaggcaaaggcttgattgagaaggctgagaagacttagagtaagggttctcagccctgactggacattaaaattatctagggacaattcaatcagaattcctgggggtggggaccaagcatcagtattttaaagttccctggggactttaacttgaagcccaggttgagaatcatttaaacagctctgttatttatttatttaaaattttaatgtattttttgagatggagtctcgctctgtcacccaggctggagtgcagtggcgcaatcttggctcactgcaactcctgcctcccaggtccaagctattctcctgcctcagcctccccagtagctaggaatacaggcgtgcaccaccacaactggctaatttttgtacttttagtagagacagggtttcaccatgttggccaggctggtcacaaactcctgacctcaagtgatccacccacctcggcctcccaaagtgctgggattacaggcatgagccactgggcccggcctagttttactttttttttttgtaatggaatttccctctgtcacccaggctggagtgcagtgatgtgatttctgctctctgcaacctctgcctcctgcgttcaagtgattctcctgacttagcatcctgagtagctgggattacaggcagctgccgccatgtctggctaatttttgtatttttagtaaagacggggtttcgccatgttggccaggctggtcttgaacttctgacctcaggtgatccgcccgcctcggcctcccaaagtgctgggattacaggcttgagccactgcgctcggcccatttaaaaaaactttaaaggtagacgtattccaaatggggggaatatataaagaaaggtaacacttattttgccctgtgtgctttgaatttcagaaggtgtagtaagcaaagaccacttactaaccctacagatatatccttagaaaatacagtggtttctgtcataaatctgataaatcagatgagaggaagggtgtatgtttgatgttgatttttctttttgttttattggggtttttaaaaactataaatatcaggtctgatgactatgtgtataaacattttctaagtagataaaatattttcaaattttgcattttttagtatgaaggggatccatcatttgaagttggttttctagatgtgatgataaacttgtcccaggtctatttgacactcctaccaaaatcctttgtgaccagggctagaaggcagctgtggctagtaaataaccctgtgtgtagactcacttattggctttggcattctctattgccacagctgtgtgaatagattaaccagagaccctctggtgccagccacctattcaggcaaacaagtctataatcagtacctctgttaaaatgaaactgtaatatactattgtcttttcatttatttatttatttatttagagacagggccttgctctgtcgcccaggctggagtgcagtggtacaatcttggctcactacaacctccgcctcccaggctcaagcgattctcctgcctcagcctcccaagtaactgggaccacaggcgcaccattgcgcctggctaatttttgtattttttttgtagagacggagtttctccatgttgtccaggctggtcttgaactcctgagcttcagtgatctgcctgccttggcctcccaaagtgctgggattacaggtatgagtcattacacccggcctattttctgattgttcaaagtagaagccaggcacaatggctcatggctgtatgtaatcccaacaatttgggaggcagaggcaggaggatagcttgaagccaagagttcgaggccagcctaggcaacatagtgagaactcatctctacaacaaagttaaaaagaaaaattagccaggcatggtggcacatgcctttagtcccagctacttgcgaggctgaggcagaaggatcacttgaactcaggagttggaggctgcagtgagccatgattgagccacagtactctagcctgggcaacagagtgagaccctgtctcagaaaagaaaagagaagagaggagaagagaaagagagaagagaagagaagagaagagaagagaagacatacaaaagaagagtaacatacaagagaagagttaggagaccctgtctcagaggaaaggaggggaggggaggcgagaggacaagagaagaaagagttaggatctatgccctaaggaagtaaggaggatttgagactgtgtaggtggttaataaccttaagctacatattttatggagggaaaaatcctatttttaaaagtgagaatagaacaattttgaagtgaaatggaatgaattagctggaccataacggctctgactgaagaaaaggatgtaaaaagccacatcctggatatgtaccaaacaccatggttacatggcatgtttgtatatgtaacatttatttaaaaaaaaagtctcatagcttagaaggcatttatttttgttatgtgtataggcttctgtgcaataaagcagccttttttattttacagctcatgatgacttaaatggttaattgcctgataaatatggtcctcttttattcttctgattctgttgttcttttgcacttcatctttcaaggggttgggctattcttaggtttcactgattgcactggaagggacatgacggaaaatgaagatctcaagataattttcttgcaaattcacaatggaagataaaaggaaagagtggcaggcattctgcacacagagcagacgtttctttattgtcattgttcagcagaggaatcaactcagccttggtgaaactagagtgatgcccatggtggcatgtcagcatctccctcttagtggcatcagtgctagattgttgttgttggaagcaggagagtgtttagtccataaagtacagaacttcgatatcacagaagctagaagaactttactgccttcagcttcgtttaaagatagtagagagcttactcattcgttttagaaatatgtattgggtctctatgtcaggaactgctggcacagcagtgagattgaagatacaacagtgaatacaatagagggcctatcctcatagagtttgcctttcagaatgagggacagacgcagacaaatagaaaatgtcgattgtgtcagggagtattgagggctttgaagaatgaaatcgtgacccagaagagatgcttttagattggatcatccgtgaaggcctctatctagaaaggagacacttgggcagaattctgaatgaacttgacggacatctgaaggaaaaatattccagtcagaaggaacagtacgtgcaaagtccccaaaacttcaataagtgacgtgctccagaagcagcaaggaagcagaatgaggcctgaacagagtgggcagtaggaaatgcagtcatagagaaagcagggctgggtcacaggcctcagagactgtagaacattggctcctactctaagacaggaagctgctgtgagcattgaggttgggcgtggaaccatttgactttttatgaggatcactctggctgcagtgtggaaaatagactggacgagggagggcagttaggaagatgtcacggtaactcaggaaagcaataccggtgctttggacgagggtggtggcagaagagaaagtgagaagtattctggatatatttcagaagaaagtggataggattttctgatgggtgatatgtagagtgtaggagaaagagaagaagcaagattgactttaatgttttccacctgggcaattggtggactggaattgccacttgcagaagtgtggaggtatggaaggtatgggaagagcagattgccaggaaagttgagttagttttgaactcattgtgtttgagaggtctgttaaattatcaagtagtgatgttgaggtgtaattggaaaagtcaacctggaatttatggcagaagttgaggctgcagatataaacttgtaattttaaaaatgtatatttaaagccatgggagtgaatgagttcatttgagattgaatgcagattgagaagagatttagaattgaactccagggcactgcatagcaggaggaaaacctagtaaaagtggtatctgtaaaatagaggaacgaactgtcacaatttgcctggtactgaggattttctcagtacatgagactttaagagactgggacaccctgagacaattggttgccttccatgggaagaaagtatgtcaagagggagagagtgaacaactgtgtccaataaaccaggactgagcaaaaaccattgaatttggcatcatgaagtcttaggtgactttgacaaggcttgtctgttgtgaacagccaagtaaatgtgaggaccactctccaaaaggtaaagaaacatgcatgaggatacaggtgcgccagctggagacatcatgcctcttccccgtccccaccaggagtggcgtgaagcctccccagtgctgtaacgaggcagccaggtcctgtgtgactgcacatgtgacttggggcaagtcatttaacctctctgttttcactatcctatttgtgaaatattgtttagatttgtggtttgagtcagctatctgtatactacactgtgttaggagctatgtagattaattttcaacagatatggttctggggttgtaggaattttcaatttgagaacaaattgaatcttaccctttgtcaggagaaatagcctttgacatgtgttaggggcaagggaaatctcaaacttgcttaattttaaaaatgaatatttggttgtggataatttaagctttggtgatatttctaattattttttgtgtgtttctagtctactgaccagaagtctgaaaaaaacaactaaaaagaaagactgcataagccttcactagagaagtattgaaaattgcttgagggaagtgacggtttctttagcctagtgtctgtaggaccccagtgtagtgtttgttgaatgaatgaaaggaggcgtatcagtcaggttcactcagagaaacagaagctgtaggaaatccatatggatgtgtgtgaaggtattggcttgcctactgctggtgtgtggctaagcgagcttaaaagtccgcagggcagatagtcaggaaggaaatattcccaacagactgagctcccttgggcacaagctgaagcctggagtctgaactgccagagagcctctaccttcttagaaaaggcttcccactggctaagtcaggcccacccaggggaatctctcctttgattaacttaaagtcacctgtttagggactttaattacattggcaatagtcccttcacagaagcacctaaatgactgatgatgtaactgaaaaaatgtgtgtgtatgctacaaaatggctgcagtctcccttctgtcctccagctcttgcaggagaactctcttgtagctcaccctgtctgaaaacatactggaaaggaattcaaggaaatgtagttcagcctagccacgttgacacatcatgaagccgtcacaaaaggtaaagcctggtttaggagcatttgcatttgcagtcttaagtatttttgtcttatttttcaaaaggggttgggcacggtggctcacgcctgtaatcccaatactttgggaggccgaggtgagtagatcacttgaggccaggagtttgagaccagccaggccaacgtagtggaaccccgtctccactaaaatgacaacaattagccaggcgtggtggcgcatgcctgtaatcccagctattcaggaggctgaggcacaagaatttcttgaacccaggaggtggaggttgcagtgagccgagatcccgccactgcagtccagcaacggagtgagactctgtctcaaaaaaaaaaaaagtagttttggtttttaatttttgattttttcttatgttattacatataacgaatgatatgcatactctgaaaaatcatgacataaaggtgaccttgaaattactttgatgttcatttaaactagtctttggtctccactggctaggagaccacatatagcagaacagcagagaaagcaaaacagttaattttcatgtttggcttttgagcttccagggacccaagtcttgccttgaaccgatcttaggaaattcctcattccctacccgaccctgtttctaaactgcatccctgctgaaatgcaatgccactgtaactctctccaatatttgttttcttctttggcttaccactagatgtatgtatatatgtttgtgtgcctgtgtgtgtgtgtgtgtgtgtgtgttgactgcctcatagtaaagcctactcttgagattaagactcctgatagtttagagaacagaaatcttttttagttcctggttattacttgaatttgcaagaggaacaactgctaggaggcctagttaacagtagttagggtctccacccacttgccaagggcaagactagtttacaccacatttggaatgaccagtttcctcccactttagtttcagtgtagaaagagtaggggagacgaactattcaatgtcagcttgggtgtagtgccagaaccgtactcagtaatgctgtcattgctgttggtgcttaccagctcttcagtactggaatagcttcagacctcgagagtttatgactttatcatcaactgggtgtgttgcccttggcacattgccacacagtgcttaatgatgatatatgttctttatcaaattccccccaccaaataatggcattatttacgtgtgagaaagttgcacatttcaccacctcatggtttattagagtgcaattccgtgagaacaactgcctgtgatcctctgtatccccagtggccaactcaggagctcagtatgccctacccagtagatgctcagaacatcattgctgagtgaggaagtcagccatcattttctccctggatagtctctcctgtagataacaggggccgttatcagccaggtttttcatcatttgtggctttgaatttcagggacatgacaagtttgctttttgtttcgttttgttttttttttttttttggttttctagagacagggtcttcctgtcactcaggctggagtgcagtgatgtgatcacagctcactgcagcctcgaactcctgggctcagtgtttctcccatctcagcctttggagtagccagcagtataggtggtgtaccaccacacccatctaactttaaaaaaaaaaaaattgtaaagacagagtctcacttttttgcccaggctggtctcatactcctggctcaagcaatcctcctgcgttggcctcccgaagtgctgggactgcaggtgtgagccaccttgcctatccaacatgacaagtattattctctggcaggaagtgaaattttttctcactgatgattgcacacaaatgtcatatctccatgaggcttctactcactagttttacggctcatgtcaccttgcttcaaactatgcttcagtataattttgaagtgtatatttccattgcctctccttgagtaattgatattcttcacaataagtttacatttattatcacttttatttacttactattattactctgagcagccaatcttatgagaagctcagagtggaacgtgtgggtcctggtaaatatattatttgactcacttccaaacacacttaatattgcctggtgttttgattatttcaaaatatacagatttcttgaaaggcctgcaaaaggaaacaatcaaaattatagcggttaagaatgtgagtctgccttggtttgaattccagatgggccagtccctagctgtgtaatcatgggaaaattattaaatctctagcctcgctttcttcatctgtaaaatgagcatacaggctgagcatccctagtccgaaaatgcaaaattcaaaatgctccaaaatctgaaactttttttgtgcctccatgacgccacaagtggaaaattccacacctgacctcacgtgataggtcacagtcaaaacattgtttcatacacacaatacttttttttatttgtataagtttaagtggtacaagtgcagttttgctacatgaatatactgcatagtggtaaagtctggacttttagtgtctccatcacccaaatagcatccattgtattcattcaggaatctagcatccctcaccccctcccatcttcccacctctccaagcctttcatgtctagcattctgtgtccatgtgtacacattatttagctcccacttctaaatgaaaacatgtgatatctgtctttctgtttctgagttttttcacttaagataatggcctccagttccatccacgttgctgcaagagacatgatttcattctttgttatgactgaatagaattattcaggcacaaaattattaaaaatattgtttaaaattaccttcaggctatgtgtataaggtgtatatgaaacataaatgaatttaatgtttacatttgggttccatcccgtggatgtctcattttgtatatgtaaatatgacatgatatgaaaaattcaaaactctgaaacaccaattgaactcaatttgcagtaagaatgcatacctcacagggttatagtgaggattgaatgagacaatcctagtccaatttctttgcacatagtaatgctcaataattattacttaaatgggtataaactttatagtaatgaggttggggctggaaaaaatgcagtttcataatttcctatagaagtcattcaatcctgactctaaactctgtattccatgtggtggttgggtggcgtgggagagtcctctttatcctgtggggttggtcctatggaggtgtctgtggcagattggcagatgcatttgtcttgtgcatagatggtgtctgttgtttcctctggcagagttcaccagtgtcctaatgcaaacttagtcctcatctggctcctgcacaggctgatctctggctcctttagcccctcatggttcctgttgtttcattttcagagggacccttgtaaggactatagtcctctcttcagctgaccttcaggtccccagtcagaaccaagggaaccgactctgtcccttctcatagcacctgaaaaccccgggaaacgaggggaatgctttgctctcagctactgaggttgtcctgtcaccttctcttctgccctcctttgccatggcataggataatgtaagtcagcaatctcattactcggtatatagccagaggaatataaatcattctaccataaagacacacgcgtgtgaatgtttattgcaacactattcacaatagcaaagacatggaatcaacttaaatgcccatcaatgacagattggatgcagaaaatgtggtacatatacaccatggaatactatgcagccataaaaataatgagatcatgccttttgtgggaacatggatggaactggaggctattatcctttgcaaactaacgcagaaatagaaaaccaaatgctgcatgttctcacttataagtgggagctaaatgatgagaacttaccaacacaaagaaaagaacaacagacactgtggcctacttgtgggtgaagggtggtaagagggagaggagcagaaaagataactatgtggtcctgggcttaatacctgggtgataaaataattgtacaacaaacccccatgacatgactttagctatgtaacaaaccttcacatgtacccccaaacctaaaagttaaaaaaaaaatcccagacaggaagtagggcatattttgcctaatttgcagcttcatcctcactccctaacttacgccactcatgtctcctccatcatcagggacagcaagagtggggaggggacgaggcctgccacatctccattctctgatcttatttcctcttgcctcttcaacagcgctttgtctctcctctccagcttgaagcccttactctggtatgtgatttcaaagcgatgaaaaactggtttcgttagtacttcccttggatctgcccttgtctcccatcaaggcagtgcaagtaaagaatccaagatatttgttttgttggtccactggagggtagagatagagaaaaacagtaacttccccaccacccccaacctcccttgggctgatgactccaaagactgccataaatgaacacttcatagagctgctattaatatgacacaaatctacttgatctaagggattcttttactttcttagggtggtcattcctaagtctttggatttcacagaaaagaaaatatattttaattgaggactgacaaaggttgccaactttttatcaattataagaattgtttttataattaccatcaatttctattatttcttttactccccctctttccaactgtggaaggtaaaattgaagagcaaagaacacttatttcaaagtgagtaaatttagctatatgaaaactcagcagattgccctgagtttccttgcgtagctgcagtccagtggaaatttcttccagaccagcaccagtcgccccagtgacatttagaaatcactgccctggattgtttcagccaccgaaacactcggtgttcactgtcagctatgattatatatgaagtgctttcgagaaccaatgtatagcataacttaggccaaaagaaacactgtgcctaaacactcagccaaggagtgttgagtttgcctggatttctggaaaattgtctccgttccctagttcactgtatttgggtaaacaaaacatggcctcggagagcctttgcgggagaaattataaaaattcagcaaagctttgtgatctcattttggatctcctcaggattcctcatcaagttgcaattaaggagagaaaaattccgccttggggtgggattttaattactcatcatgttatgacttgactttctgtgctgcatttttttccatatcactacttctgtgtttgacagctcctccaaagagtcgctccgttttatgccaggagcgaagtacttactaagtcaaaggaaagcaaggcaaacatctactattgcctttgtgcttttaccagaaaactgggtgagaacctccttttccttttccctgcccctccagcctcagttttatgaccctgtggagccagtggactttgaaggacttctgatgacacacctgaacagcctggatgtgcagcttgcccaggagctcggggacttcactgatgacgacttggacgtggtgttcacgccaaaggaatgtaggactttgcagccctctttgccggaggaagggtaaatagttttctaaaatgtagatgtgattgggattgtcatgattgttttcaataagtgggtaggggagatgccttcaatctgaacttaaaaataaaataaaattactcaatccattcaaatgtgtgggacagctatatgatatcatcatgtaagtatagatagtttttaaattagtttggccagagattttgaaaagctatgtgaagactaagccagtgcaagggatgcaggaggaccaaatgaaatgctcaagaggaggttaaaagtgcaggctctggagccagaccacctggctgccagctcagtgaccttggctgtcacatgacctcccaaatcctcggtttctccatttgtaaaaatgtcaagatttttaataataattactgaaatgccaccatccagaagcattttaattgcttacagttatgagactggatcaagttagaaacataaggtaaacccacatttattgagcatctactatgttctgggtactgagataaaaagatgaataagtcaaagtccctcctttaaagaaagtgtcatgcagtgctaaaacagtggggagagctctgtagaataaatatgtgaatagctaattagggcttgagtttctatagttggctcttctatatgtttataggcttgggcattagtttttggcatcaaactaactgtggaattgtagctaaatgaaacgcctgttgcttctaaaatgtaaaaaaaaatgtctctttggaggtttaggataaacttttatttacatttattttaaaagccaaattaagattcatatcctcctggacaggttccatcttctcatcttccccagaaggtcccagaaagaagatcctgacacacagcccctgccctctttactctgagatattctagttctattttggattttatttcatcacagtttaaggaggttggatgataatgggctggtattattgtgaaccgttgctctcttgttcagacagtcctcactcacataggagaactgaccatatgtgtagctctgatgttttaaaaatacacacttcccaggaaagaaaaacattgtcatttttgggaaacatactcccccattttcagtccatttattcaggtatgactttagtataagttaacacctactatttcatctttagtgaagaatcatttaatttattcctttatgtaaaatttatggatgtttccaaatatggtcagaatcttggaaaaagctgtttaaaatgcttacagtagccagtcaccgcagcttgttcctgtggtcccagctacttgggaggctgaggcaagaggatcacttgagcccaggaatttgagttcagcctgggtaaaatagtgagaccctgtttcttacaaaacaaaaacaaaaaacagtacaatgaatttagaggaaggaggaggtttttttttttttgaaatttgataaggaagataatttctttacttagcatcagttttttagtatactgttgccttgtcaaaagaatttataggtaacatacctgtctgatgtctttaagacagcctctactatttcagttgttgccaaaaagtcttctgtataattaaggcaggggaaggtatcatcatcacaccagagtaaacaatagctgactcctgttgaacaacctgtgcctagcccagaactttatgttgagctgtgatggcgtggtagtgaaaaacatgaacgctacaggtgagctgcctggattcaggtccctgctccaccacttgctgtgtgacttggaacaagatccttaccatctcatttttctgcaaagtgagaataatagtaatgcctgccctatggtgctgattgagaattaactgaattaatacatataaagtgattgcctcagtgcataatgcacagtaaatgctacctaagtgtaaactattaatatcatatatgcgtcttattgtgtgccaggcagtcttctaagcactttgcacactaaccgatttaatcttcatcaaagctgtctactaaaaggggcactcttactactctaacagctttaaggagaggaaactgaggcacagaagggttgagtgactggcttatggtcacatagctataagcgatgaagctgggatttgggcaattagggcccagagactgcatgtgtaacctttacaatattttatctaatactaacagcatgtctctgttcttacctccttatcacagatgagaaaattaaggcttgtagcatttaagcctgtttatttctggtactaatgcatttgcaacaatagcaaaaagctttgctacaattgttatttttgatttcaagactctgaagcacttgaagagtattgctcatggtgcattccttaagtagacatgacaggaaccaactgaattaatgatcaccaacaaaagccagtgtttgcaatttcatcaaagcataagacaactgttctttttcctggctttcaaaaaggagaacacgcgtgtcctaacaaggttacacatgcataaaaaatatgtccaaattaccctgtcagagataggtatttatacttattttccttgttttgtattcgaatacagctagttctacctgtcttgtgtctgaatgccttcggggatagttataatttaacatgattctgtataataaagaaaacccacaaagcaaaaaaatgccaacatgtttgtctcatcaaagtaaaaatgtttattgccccaggaatacttcagacatttggaatgattgggcaagaacatcctaagcattctcactgataaggatttaaattcgtgtcatgttccttgctcatgattaggggttgttttgttgttttacccagtaataacgtgtttatttcattttctacctcattagggttgaactggaccctcatgtcagggactgtgttcagacctacatccgtgagtggctaatcgtgaaccggaagtaagttactttttttccactttttgtatataaatattaattttatattgctagtttttaaatatttcttaatactttgaacagttctaggtttacagaaaaattgcatggcaaatagagttctcatgtatgccttccttatccccactccatatcacacacacagttccccctattatgaacatctcactttagtgtggtacatttgttacagtagctgagccaatatggatatgttgttattaactaaagaccatagtttacattaatgtttactttttgtgttgtatattctatgggttttgacaaatgtgtaatgacatgtatatgcctttacagtatcatacagaattgtttcactgccctaaaaatcctctgtgttccacctgttcatcctccctccctggcaaccactttccttttttactgtctccataattccaccttgttcttcaatgtctttttgtggcttgatagctcattttttttattgctgaataatctttcattgcatggctgtaccattgtttatttatccattaacttactgagaaagaaagttctattttaaacataaagaatagactgcaagcttgcccaacccctagcccgtgggcaacatggagcccaggatggctttgaatgtggcccaacacaaattcataaactttcttaaaacattatgaggtttttttttttgcgatttttttaaagctcattagctattgttagtgttagtgtatttgatatttggcctgagataattcttcttccagtatggcccagggaagccaaaagtttgggcacctggaatagagcctttttgttgtcttctaattctgatgaattcccagggggaaaaattaagtgaattgaaacctggcctcagcttcagaggtggcattcgagtttatgaccaagaaataaattacttgctggccttccagtaagggatctttctctcctggattaatcaaaccttctgtgacattgttctgagctttttctctccatgccatggacctggacagcactctctcatgagaaacatctatgcacattgaaattctcagcctgcatgggtgtacctgttggggagtgagatgtggactctctacagattagggcacaccccactagagacacgtcacagaacctttgacaagacattagtagtttaaaattctgatagcctcactcctcctatacctcagtaagaattactattctatggggtaaatgatgaaagactttgaggattgggttttatctagctcctggaagggtgccattgagtttgtgctgaggttttctggagtaatgtcaatatgcacacattttcagcagcagaaaaagagaaagcattcattattaaaagttattaagagaaagttagatgccaatccatcatctgttctaaaatgaatggaaaacaaagtttgctgggcagtcagataaaattatggtttgctgataataaataaaagatttcagaacaagttgttctcaagtttttaaatgctatcattagaggtactttctggacattaaagatctaaaaaaaatctgagaaggaacaaatagaaagatccattttgatacatttggttttcagatttattttctatttcgggcttgtccactttttcatttctcatggcaatgcacgcttcttggagtagtgatttttcttgatcttgcacaaatgtaagagaaaaaaatgactctttttggaatactcgttgaaattttagaaataattatgaaacacaaatcactcagtttcactctagacagataatcatcatgaacatttgatgtctgtcctttgaatagtgttgggtttttttggtatatatttgcgtgaaaactaaataagattataatatcatttttgtaacatgcattttcagttttcacagtaaagagtgattctcttcctttgctattaaatatgcttcctcaatacaatgattgatgattgcataatatatttataccaaaatttatttaaccaattttaatatttaggtgattccttccttttcagtgttgtgcttaaaatgcaaaaacatccttctcaggaaaaatttgtacatatttatgatttttttctttggaattaattcctacaagaggaatttctatgtcaaaggatatgcacaaatttaaagatttggaatactagatcaaacattatgccgggcgcagtggctcacatttataatcttactcagcactttgggaggttgaggtaggaggatcccttgaacccaggagttcaagaccagcctaggcaatatacagagaccccacctctaaaaaaattttttaaaaaattaactggatatgatgacatgcacctgtagtcctagctactcgggaggctgaggcaggaggatcacttgagcccaggaggtcaaggctgtagtgagtgacgattgcaccactgcacaccagcccaggcaacagaggaagaccctatctcaaaaaaaaaaaaaaaaaaaaagccaggcacggtgctcatgcctgtaatcccagcactttgggaggccaagacgggtggatcacctgaggttgggagtttgagaccagcctgaccaacatggagaaacccagtctctactaaaaatacaaaattaaccgggcatggtggtgcatgtctgtaatcccagctacttgggaggctgaggcaggagaatcacttgatcctctaaaaatagctaaactgggaggcagaggttgtggtgagccaagatcgcgccattgcactccagcctgggcaacaagagtgaaactccgtctcaaaaaaaaaaaaaaaaaaaaaaaaaagattattgacactacatgcatgaatcctcaagaatattagatgttataatttatcaacatttccaattttatttgataaaaggttgtcttttttttcattttcttttactattagattaggcatctttcttctatatatttcttggccattttttatttttcctggtgctctgcttattcgtgaaatttgtgcatccctattaatgtatttgtctagtctgatttatttttataagcacttttttggtaaagatattaagccttgtctaccatgtattaaaaatgtcttccccagtatgccttttgtcttttaaagttgtttttaattttcaacattcagaattatttatgtcattaaatctatattaatatttttccttatgtttaattttggcatcatgcttaaaatttgattcacaaacttattattattttctaagagtatgggattaaagcattaatccagatcattagccacttgactgttgcttctgttcccttatgtgtctccatttgtttttatcttttctacagaagcaatggttacccatatatttattatatgcaagtttttgcatcttgttcccctaaaaaagaaaggaatatgtgttttaattttatgtttggcaacattctagggatgggattaccattggcccagttctctgcacccctgtgtaatggagcagttcccttcttaacggtcacctagtggacagggagaagtgtacaacttcagaactcattgtcagtttctggcaagctttcttgtagaaaagttgcatctctttctatccctctgcctcattctcttgcactctgaatctaacactctgcccatgaaaactaaaattcctagcacacactcctcccagggatcattctgtctctatatgcacctgtcgtattttatctgtggggagaatccagtacactattgccagatgtccttcatctcccaacctcacacagtacatttttagcttattgttttctgtgagttgtatctgtattgttttagaatgatggtagaaggagaaggacaaggagaaggtggtgattcatataaatgaaaccagctggaagctgtgatgctttcatagataagccactattatgaagaaggagacttcagatttctgtatagacactgaccagggactcgtgggcaggaaggtgtgcaacaccttcttatctttattcagtgagttcccctttggggagacaaagtttggtacatccttctctttccagctccatctgatccacagaggttctgtccagattcaggcattaagttatctcttcatttggatgagtttccagtttttctgtgtcttcataagtggtttactagaaagtcggaggaggatgcaataggggttgctggccatttgttaattagtgattaattatttagctctcctttaattggttatgtgccaaatcatgtatgattgttttgaaagaaatcaagtaatatggaggtgcattaaggaaaaggcaaatctcatgcctcactacttaccagtgtcctacccttcccttaactcactcttcactgcgtaaagcccagctgtgtagcttccagatcttttcataccctcacaaaaaatatttgtctatttatatttttcacataaagatatatgtattaatgtatgtacttatatattacaaacatttctttaaaataactgtccatgtcagagctatatcccattctactgaaatgctgcctagtattcaaagggtgaaggaatgtgtcctaagttactgaaactaaatgaccattttggttgtcaccatttttcataattgcaaataatactgaaacaaacatatctgcacatttgccccatacatgtgtgtgaatatttctgagggtagaaatgaagccagtgtacatggtatgctctgataggtactgccaaattcttctccagaaaagtcgtgctgtttcattccattaccaactgggcattaaactggcgtgttcccatattcttgccagtgctggatattatttattaaaataaaatttcagttcctccagtcttcttttagttattattttaatctggaagctattacacctactttctgaatacagtttcctatcaccaagtttcctttccttatgtgttctaaaatcccagttaaatatgcacttaaccatacaaccgtaagtcccactcttgagtatttacataaaacctatgtgcaaatacagcagtttagcagttttatttgtaattgccaagactgcatagcagttttatttgtaattgccaaaaactggaagaaaacccagattgtactcagttgggtagtagataaacaaactctggtaaatccatacaatggaatactactcagcagtgaaatggaacaaacaattgatatatacaacaacatggatgaatctcagatacagtatgctaagtgaaagaagccagacaaaggccgggcatggtggctcatgcctgtaatcccagcactttgggaggctgaggcaggtggatcacttgaggtcaggagttccagaccagcctgaccaacatggtgaaaccccgtctctactaaaactacaaaaattagctgggcgtggtggcacgtgcctgtagtcccagttactcaggaggctgaggcaggagaatcgcttgaacctgggaggcggaggttgcagtgagctgagatcatgccattgtactccagcctgggcaacaaagtgagattctgtcttaaaaaaaaaaaaagaagaagaacccagacaaaaaagataactgcatgattccatgtatctgacattctggaaaagatgaagctacagggatggaaaacaggtccatggttcccagggtctgggagtggggaagagggctgactacaaaaggacacgggagtgccctttgcgtggtgctgggactgtagtgcccatgatgtaaaatctgccttggaccattacattagaagaaatcaattccagttatcccaatattccctccaagtgaaatactttggtagcatatataataataattcaataagtattagctattatatttattaagtagtacctatcagaaaacatacttatattagcatgtcaaaggaatgaacacaaaattctctcccatatattgaacgcaccatggaggggggacctgccttcctctggaggaccatacttagtgaagccactttgccttataaggacatgcctttgttatccagaaccaagcagtcaaacactgatttagttagctcctttatttctcagttatctcctgctgatattacatttctccataatatctagagataggcttttatgtccttgctagctgtggtaatggttttgaatcccacttagggggcagaggagtagagtaatggccacttgtgttccctcccaccctcatcattctacagggcatttgccactcaagtactgtaattgagacatttaaatcatacaaataatgctgcccatgaaggatagaggaaatttttagatttccttttaaacctaacagagaaagattaagttacataaaaatgtaaaatacatgatctccagtacattgaaggaaatgtattttcttacttgaaatgtttgtgttacttagactggaagatttattaaatgatttccattctatcactcatgtttacagcaccaaatttggtgtccttgttctaaaaacaatagtacttttctccccatgacttttgaaaatgattactggtttactgattagcatggcgccatgtttgcttgtttgtccaaccttttatctgcatattttgataatgttgtgtggattaatatttgatgacatcctttgggtgatattaacgattttaagctttatttcttctgtcattttctctaaatgaaccaaagagggataaacttcagaatgtttttgatgcctggtggagagctgaactcttaagaaattaaacttgtttacatactatatttattcttgccgcagagacagtgaaacatttcatgagtgttatgggcagcatcataaaagcctttagactttgtttttcatctggggtgattaaggtaattctgaaggaaggttgagctcaaggagagctgagatatcaaggaatggggtatcatctgttttattactccatattttactcccagtgaagtggtaaacaattaaaattcaaacacatcagtgcatataattcagttactcccagaacaccataaaaatgtttccctgatcaataattgcttattatgacatgcatttgttgtgctagctgtcaaggtgcttagctatttgctttctaaaagtatgaaaagcacgcccggctcatcagcctatgtggtaacaaagagcaatccagctgtggatgtcacagagccactcttgacctgttgtgcatagactccctccccacaaatccaaacccactaagactctccaggctctgttaacacacaccagcctggttcagcttggatgccctcctcacaccatgtgggttctgattttccatgccaggcagtccatcttaaatggatgcatcctcaccgtgtttgggcttcaacttcctattctggacctcctcggctactccctaccccaaggcatggagggctgccttgttctgatgcaccttatgattttagcaccaaattgtacaggaagggagagaagggaaaggagaaagaagatgtgaaaggaaagagagggtagggaagaggaaaaagaagatgaggaacacgtattattttctaatcctcacaataggtcctcaaaatgagcaacatttccccctatttcatacttgaggaagctgtgactcagagagactaaggcacttgcccaaggtctcttagtacattaaggagccagcgtctgcacccagttccttctgactctagagcctggattctgctggctgcaccacactgtctttaaagagaacactctcaaaacgcgcttggtctttggattgtctcaaatgtgttagaatagtgttttaagaaaaggaatgcagatctcctgggaagcaataggtcgagttcatttcatgagaatcatttttctagccattggcctacttccccatttttctcctgtctgcatctaggtgcaacaggaacttggctttatttgactccattgccagggtggggtaatgaagctgggactctcttgtagccagcggcagtgagccagcagtctcactgcctacccagtgatggttccttctgtggccagcacttctggaatgagtcatctttacatgtttgccaacccttgtcctctcctccccagccaggttcacccttgctgctgtcaaggagctttgagactttctgagatttttaaatggggaagtagatgttaaacctagtatgaggaagagagggaaagtttgctctggtttcaaacacacagtcatagaagatgctagtcttaatgctttccatagcaaaaaccctgaaggcttagagtgtacacattgtgaactgaacttttaacattattgtgtaactcatttgttaatgcctatttgtcattgactgtggggtccatgtgaaaaactcccacaaacactctaacaaaatggaagacagaaaagaaagcaagcatcatttgtgtacaatagccaaagaacaatagccaaataaatttgatggtctcaaaagttaagcatcttttgaagagaaaatttgattttagggccaggtggggtagctcatgcctgtaatcgcagcactttgggaggcagaggcgggtggatcacctgaggtcaggagttcgagaccagcctggccaacacggcaaaaccccgtctctactaaaaatacaaaaattagctgggtacggtggcgcatgcctgtgatcccagctacttaagaggctgagacaggagaattgcttcaactcgggaggcggaggttgcagtgagccaagatcatgccgctgtactccagcctgggtgaaggagccagactctgtctccaaaaacaaaaacaaacagaaaaaagaattgattttgattttttcagatacagtgcatgaactttttatcataaaatattaaagctggggaaaatatcttagaattcacctcatgttcatgctttaccctgtgaagaaacagaggcacagagagaaataacttgaggataatggaaacaagcacacatctgtaagtgtgtgtgtgtgtgtgtgtgtgtgtgtgtgtgtgtcagagagagagagagagatgttcctttgtaagtaaacactcttggaaatagccgcattttattataacacaaaaagtaatgctaaagctgatatagttctggttgctaagcttcacacacaaaaggtctttaggtagctgcttcctaatttttatttctgtggcccaaaagtctccttgtaaaccttcgtgtcatgtcatactaaacctttgacatcaataccctttaaaatgtacaagtccttaaaaaaaaaaaaaaggcaaagggcaaatactaatgtgggaaatttgaattttaattaactgtttgtttcaatgttaggataaattaatgttagataaattctttggtaatttttccccctaaaattggatttttcaagaaacatcactggttcagtatattgttatttggggtagcataattttaggcgataacttaatatttgcatatatttgtcactactttgagttggtttttgtcccctgacccccagccaggatgttagatcacacagatttttttttctttgagcccttagggagagtccaaaacagtcacttcatgtactaggaaagtttacccagtcagcacacacagatatgttgttgcctacatttatatttgtgagagtgactgttaagaaactagcaggtttataaaatccgtgtgagaatttctctcaaataactgttaatggacaatccagcaatcctcccatctcaggctcccaagtagctgagactacaggcaggtggcaccatactcggctaattttttgtgttttttgtagagatgcggtttcaccatgtcacccaggctggtctcaaactcctgggctcaagtggtgctcccgccttggcctcccagagtgctgggattacaggtgtgagccactgcacccagcctgtacattttccttgaaatcgtttttggatgtttagtcttatttccttattcagagttcacctgtttattttttttttcatttccccaatttagcctgcgtttcacccagccctagcaatataggtttgggtcagagaaattcaagcggccaggggatgctgaagatggcccattatggccgggcgcggtggcacacatctgtaatcccagcactttgggaggccgaggcaggcagatcacaaggtcaggagatcgagaccatcctggctaacacagtgaaaccccgtctctactaaaaatacaaaaaaattagctggctgtggtggtgggcgcctgtagtccaagctactcaggagactgaggcaggagaatggtgtgaacccgggaggcagagcttgcagtgagcagagatcgtgccactgcactccagcctgggcgacagtgagactccgtctcaaaaaaaaaaaaaaaagatggcccattgtggtaagccttgacttgaattagtcaccaagctagtcttatctcttttctaggctaattcttgttttttgtttggctcaaaacaaattgtttgtcttcagaacacaataaaatccagggagagtgtcctgttcttcctacagacgtcactgggacatcttattctttaattaattcagtcaactaaaattggtcaaatacctgctctctgtgccagagttataaactttgtatttgtataattgctagtagctctcttacatttcttactttatctatctggcatttgatctacctaataccttccaatatcacctcatgtccctttaccagcttggtggtttttctatagttcaggaaatcaaacaaaatggtgtgtgacctggaggtactagaaaaacaatagcaaaccaactccaaagccagcagaagaaaacaaataaccaaaatcagagctgaaaaaaattaaaacgtgaaaatccatacaaaagatcaatgaaaccaaaagtttgtgattcaaaaaaaaaacaaggttgatagatcactaactagattaataaagaaaacaagagagaagatcgatccaaataagcacaatcagaaatgacaaaaatgacactacaactgatgcctcagaaatataaaaaatcctcagagactgttataaatacccctatgcacacaaactagaaaacgtagaagaaatggatagattcctggaaacacacaagccccctaaaattgaagcaggaagaaattgaaatcttgaacagaccaatagtgagttctgaaattgaatcagtaatacaaaacccaccccaaaaagcccttaatcagatggattcacagccaaattataccagatatacaaagaagagctagtaccaatcctactgaaattatttcaaaaattcaaggaggaaggactcctctctaactcattctgcaaagccagcatcattctgataccaaaacctgggagagacacagcagaaaagaaaacttcaggccaatatccctgatgaacatcgacacaaaaatcctcaacaaaatactacaaaccaaatccagcagcacattgaaaagttaattcatcacaatcaagtaggctttattcctgggatgcgaggttggttcaccatacacaaatcaataaatgagactcatcacatagacagaattaaaaacaaaaaccacaggataatctcaatagacacagaaaaggcttttaacaaaattcaacatcccttcatgttaaaaaccctcaacaaattaggcattgaaagaacatacctcaaaataataagagccatctattattcaactatccacagccaacatcatactgagtgggcaaaagctggaagcgttcctcttgagaactggaacaaaacaaggatgcctactctcaccacttatatcaacatggtactggaagtgctagccagagaaatcaggcaagaaaaagaaataaaagacatcccaacaggaagagaggaagtcaaactagctctgtcacagtgcaggcaatataattctgtacccagaaaacactgcagaccctgctaaaaggctcctagaactgataaacaacttcagtaaagtttcaggatacaaaatcaatgtacaaaagtcaataacatttccacacaccaataatgtctaagttgagggccaaatcaagaatgcaattccatttattttatccttttgaataaaatacctaggaatacagctaatcaaggaggtgaaagatctctacaatgagaattatgaaacacactgaaagagatcagaggtgatacaaacaaatggacaaatattccatgctcgtggataggaagaatcaatattattaaaacagccatagtgcccaaagagatttttagattcactgctattcctatcttaattagcaacatcattttttcacagaatttaaaaaaaaaaacctattccaaaattcatgtggaaccaaaaaacctgaatagccaaagcaatcttaagcaaaaagaacaaagccggtggcatcacactgtgtgacttcatactacactacaaggctacagtgaccaatacagcacagtccaggtacaaaaacagacacgtagaccaatagaacaagataaagaaccagaaataaagctgcacgcctacagccatctgatctttgacgaagttgacaataacaagccatgaggaaaggtctccctattcaataaatggtgctggagcaactggctagtcatatacagaatattgaaattggacccctccttttaatcatatacaaacattaactcaagatggattaaggacttaaatgtaagacctaagattacaaaaaccctagagaaaaaaactgggaaatactattctggccattggccttggtaaagaatttatgaataagtccccaaaagcaatggtaacaaaaacaaaaattgacaagtgggacttaattaaactaaagagcttctgcacagcagaagaaactatcaacagagtaaactgataaccaactgaataggagaaaatatttgcaaaccgtaaatctgaagaatgtctgatatccagaatctataaggaacttagataattcaacatgcaaaaaaccaccccatttaaaaatgggcaaaggacatgaacagatacttctcaaaagaagacatacatgtggccaaaaaatatatgaaaaaatgcttaacatcactaatcattagataaatacaaatcaaaaccacagtgtgataccaactcacaacagtcagaatgcctgttattgaaaagtcataaaatagactgggcatgtggcttatgcttgtaatcccagcattttgggaggctgaggcaggaggattatttgaagccaggaggttgagaccagcctgtgcaatgtagcaagactgtgtctctacaaaacatcaaaataaatggaaaaaaaaaaagaaaaagaaaaagaaaattaactgggtatggtggcgtgtacctatactctcacctactgggaggctgaggtgggaagattgcttgagcctaggaattcaaggctgcagtgagctataatcacaccactgcactccatcctgggtagcagaacgagaccctgtctcaagaaaaaaaaaaaggcaaaaattaacatgttggaaattagttcagtcactatggaatgcagtgtgaagatttctgaaagaacttaaaacagaactaccattcaacccagcaatcccactactgggtctatacccaaaggaaaataaattgttctacaaaaacgacacatgcactcgtatgttcctcacagcacaattcacaatagcaaagacatggaatcaacctagatgcccatcgacagtggactagataaagaaaatttggtacatatacaccatgaaataccacacagccataacaaagaacaaaatcatgggggtttttttgcagcaacatggatgcagctggaggccattatcctaaacaaattaacacaggaacagaaaaccaaataccacatgttcttatttataagcaggagctaaacatcgggtaaacatgggcataaagataacacggtagacaccagggattactaaagaagggaggatggaagcaggtgtgggttgaaaaactgcctattgagtaccatggtcactatgtgggtgacgtcagtatcatgcatacatcaaacctaagtgacatgcaatttacccatgtaatgaatttgcacatgtatcccttgaacctaaaataaaagttggaaaaaaataaaagataagatatcccgtatcctcaataaaaataaaagtggcgtgtttgtgcacttgactttgtaacatgttttccaaagatgtctttgagtcataaaaatgggaaatacacatgttggtttctctagtcatcacttgacaacttacatgttttacctttcttatgatggtctgtctcatttcttcagtgacagggctagacattctgttttaaactcttcccacagctgtatattattcaacacaactttaacagagttcatagagtggagattgaggatgtttgcaaagttaaatcatttatttttattttttcttaaccatgtcccgcctgctttattcattattaagaacattgatgtgaagattaaatggttttctctatttttatcttcaaacgatctctatttgtggcttctgcacattgctagatttattccagccacttacactagggtcatagtttagcttcagctcggagccaaatgccccacagctgaaatgaccgcacctctgaagtggcattttcccaggccatgcctccctttaataatgagccagccagggggtaaatttgtatctcattacaacagagccttgtattaggcctggagaataattaaatgtgaggaattataattggttccctctttgaaagctctctcagcaccatgtctacacttaagccattacttttatttttaatctaatggtttgccgctctctctccctctttctctctccaaattaaatatcaaccataaaagaaaccaaggaagtccagaaatctgtggctttaaaaagactggatctcgaaaagattttcacaagacgcttccgaaacagacgtttgagtcggaaaccttggagtgcagtgaacccgctgctcaggtatttcctgtcaacaaacatggttaccaggttactgggctcttctgcccagggcatgctgtcagttttacaaactagaataaacgatagacgcatagaaagtttgagtaggaggaactttaccatctgagtcagtgattttttttttcaaacttatttgtagctgtagaaattggtgttcaaatgaaaacccagaaacccaatgattaaaatagaaaaaagtggaaaagctctaactgggggacagagacaccttgggcccatccctacgacagttcctgcagagactcttggtgcccctaaggcaaactacagagtaatgaaaagctctatgctgaggccagaatacctgcattctcctagtgattctaccatgtactaactctctaacttcaagcaggataattaaacttattgggcttcagtttcctcccctgggaaacaaggatggtaatactaactcatgaggttatttgagtattaaatgagttaatatccataaagaattagaataatgccaagtacacttagtgcctagtcaatgctggtcactgttattgttattgtcattattctttttcttttttttttttgttgagacagagtctcgctctgtcgcccaggctggactgcagtggcacgatcttggctcactgcaagctccgcctcccgggttcacgccattctgctgcctcagcctcccaggtagctgggactacaggctcccgccaccacgcccagctaatttctttttgtatttttagtagagacggggtttcaccgtgttagtcaggatggtcctgatctcctgaccttgtgatccgcccgcctcggcctcccaaagtgctgggattacaggcatgagccaccacgcctggccagttgtcattattcttataaagtaattacagtttaaaattcaagttaaagtgtacatattgtgaaatgagcttttaacactattctgtaactaattttttaaatgcctggggtcatttgaagaactccagcaaacactctaacaaatagaagacagaaagaaagcaagccttcatttgcataaaacggccaaagaacaatagccaaataaattccatgtttccaaaagttaagctctatacacctatgctcacagcagcattattcacagcagccaaaaagtagaagcagcccaagtatccatccataatgaatggataaacaaaatgtggtcgccaggggctgggggagggaggagtaggaagttattgtttaatgggtagagtttcggcatcccaagatgaacagcattatggagatggatgctggtgatggttatactgcagtgtgaatgtgtttaacactactgagctgtccaacctgcccattttatagatgagaaaaataaaattgagaagaaaaaatttgttcaagtttgcacagaacttcttgtaaactaatatagttttcagcttccatgtgtcttcataatacaggaatctcaccatgctggaaatgattcgaggtttttaaataatactaatttttcagacaaggtggtccccctaaagcaaagcccactacttacttggagcttcacagtagaatcagccatcatttccagcgctaaatatgacaggcttactgagggatagaatacctggatgctctgctctatgggagatttaaggaatttttcatcagtaattttgactgaattccattttcaccctacatgctgaccaattaaattgttcctcttaatgttagtcagatagaagccacggtaggtatttcagcagaagaaatttaacacagggaattgattaaaccggttttggaggtctgagagaaccaaaagggaaaaatggaggctatcctaaaatcgtcattatgggaaacagcacaccagcctggggctggggtatacggcagtggttctccacttcagcttcatcagaatctcccagagggtttgttcaaatataggttgctgggccctgtctgctggaatttctgattcagtaggtctggagggtgaacctcatactttttaattagcatttcctaagtgatgctgatgctgctggtcccaggaccacaatttgaggactgcaggtctaggggaagatcttggagttgtcagaacgtagaagctcagaagaggagcctgagagcaaggactgaaatccctgagaaggtactgcccagctggtggtgttgtctcaagatctcagagggaaaaacctcatgaagcctggactcacgcctcacaggaggagaaattgcccggctggtgctggtaccttcaaggaggtaagataagggtgattctggaagtaccaaaagaacctgaaggctagaaccagctgtcactacgaaggtgagaggaatagcaagaggaaggagccaggccctttgacctccttgaaccatccggtaaccctgtagtgctccctattgacagaacctaaagggagcagcagacacagcggaaatatgatttgctgacctagcatcaaagaacaaggcataaaagggtgaatttggagcccagaaacaataggtgaagaccagcgtacacacaaagcacacgctttcctgcagcatactagcagagaactcaagtcactgtgttgtgtgtggttttttttgttttttttttttttttttttttttttttttttttttttgagatggagttttgctcttattgccaggctggagtgcaatggcatgatctcggctcactacaacctccgcctcccaagttcaagcgattcttctgcctcagcctcccgagtagctgggattacagacatgcgccaccacgcctggccaattgtgtatttttagtagagacagggtttctccatgttggtcaggctgatctcgaactcctgacctcaggtgatccacccaccttggcctcccaaagtgctgggattacaggtgtgagccaccgcacccggcccactgtctgtgtttaagagccaacttgatcatatgatccagcagtctcactactagatatatgtccagaggaaaggatatcagtatatcaaagagacatctgcactcccatgtttattgcagcactattcacagtaaccaagacgtggactcaacctaagtatccatcagcagaagaatggataaagaaaatgtggtatgtatacacgatagaatactattcagccataaaaaaatgaagtcctgtcatttgcatcaacatggatgagtctagaggataagtgaaataagccaagcacagtaagactaatactgcatgatctcacttatatgtggaagataaataagttgatctcatagaagtagagggtagaagtggtaactagatgctgggaaggatggatggagaagggaatagagaggttggttaacggttacaaaattatagctagataggaggaataagttctagtatttgatagtactgtaaggtgactagaattaataataatttattctgtgtttccaaatagctagaagaaaggattttgaatgttcccaacacaaagaaatgataattgaggcaatgggtacactaattaccctgatttgatcattacacattgtacacaggtattgagatattacactgtattccataaataggtacaactattatgtgtctattaaatttttttaaagagccaaattgtacaaaagttgtttgttttgaaatattggaataatactcatcatggagagaatctcagactgcgagatgacagcaatgttttcaattccactctcattcttgtgcaccttcttattgagtagaatggtgaggccacatagctagatttataaaatttaaacaagtatatgataagattccttggtacacgtagattttataaaaattagattatattatgcataatattgcaaaacttcctttttcatattagcaatatactgtgattatctttctcttccaattaatacgtgttctttcttttttagagacagagtcttgctctgtcgcctaggctggagtgcagtggcacgatcttggctcactgcaacccctgcctcccaggttcaagtgattctcctcccttagcctcccgagtagctgggactacaggcatgtgccacgacacccggctaattttttgtatttttagtagagacggggtttcaccatgttagccaggatggtcttgatctcctgacctcatgatcccccggccttggcctcccaaagtgctgagattacaggcatgagccaccgcacctggccaggttctttcttttaatggctacataacattctattttatgaaagttccaaaatctcttaacacttcctttttgggggcatttagtttacttctattgttttgctatcacgaacagtgtttcagagatgcccttgccctcacattcttgcacacttgccagttataccctacggataaattcttagaagtgaaatttctagattaagggatgagtaatgttagatttttttacttatatgtatcttgatatccttttaaataaatttgggaaattaaagtcattttccttaaactcttataaattttaagaaaaacaaaagtattaataatcgaagtgttaatattgattatttctagcacattcagtttggggaaaatttatgatctagtagagtagtacttttgtgaggtagatgtcacaaaaaatgtgtagtatggagaaattgtccagtagtatgtccatttagtagaattttgagaataacattttgccataaattttatagatatttaccattaatccatttgtagtcctacaacatatagttgattacagttatacattttttgctgagtctttggttcaaagcatgcagttcccaattacaaagacattcctaatggaataaaacatccactttgtgactgatttaaggttgttttcttaaagcacaccgcagccaaaagtggacacagcttgaatagcaaattttttcctttttgttgttgttgcttcatccaataactgttaccaaattcccgtagaaaagtgttgcccactcccacatcgacctttggaagcataacattcagctttggtgtctatacacaatttaatttggaaggctcctcacaaatcatcttattttccagtttcaaaaaccaagttctgagtggagattaagacagggtctctttatttcccagtgcagtctcctatctatttatttgtgaatgaatgaattagttaattaatgagccagggtttcactttgtcacccaggctggattgcagaagaagtcatcgtggccaagcgtggtggctcatgcctgtaatcccagcactttgggaggccaagacaggtggatcacttgaggtcaggagttcaagaccagcctggccaacatggtgaaaccctgtctctactaaaaatacaaaattagccaggcgtggtggcgcgtgcctgtaatcccagctactcaggaggctgaggcaaaagaatcacttgaacctgggaggcagaggcagcagtgagctgagattgcgccattgcactccagcctggccaaaaaatgtgaaactccgtctaaaaaaaaaaaaaatccaatctttcctattggctttattaaatacactttaactttagaagcttagaagcacaataattagaactggcctaactttaaaaaaaattttcacaaagaaattagtaacttgtagggtcatttgtaatctttttctctgttgatttttacagttttaaaaagttaatacaataatttatttacttattttttgagacggagtctcgctcttgttgcccaggctggagtacagtggcaccatctcgggtcattacaacctccacctcccgggttcaagcgattctcctgcctcagcctcccaagtagctgagattataggcactggccaccatgcccagctaattgttttgtatttttagtagcgatggggtttcaccatattggccagtctgatcttgaactcctgacctcaggtgatccgcccacctcggcctcccaaagtgctgggattacaggcatgagcccaatattttaaaaatagtacattattacagaagctagatgtgcactttaaattattatcagaaaattagtatgacagacaaattctatgattgtcccatcatctgggcctgtgacattcacacctttgtgatgttcatccccgactgtgggtgggacctgggacttgcttctgtcaaaacaatatggcaaagcatgagaggatgtcacttgtgatcatattagatagcagccaaaatggattaaagacttaaatggggccgggcgcagtggctcacccctgtaatcctagcactttgggaggttgatggcggcggatcacctaaggtcaggagtttcagaccagcctggacaatatggtgaaaccctatctctactaaaaatacaaaaataaccagatgtagtggcggacgcctgtagtcccatctgctagggaggccgacgcaggagaattgcttgaacctgggaggcggaggttgcagtgagctgagatggcgccattgcactcaagcctaggtgtcgcagcaagactcggtctttaaaaaaaaaaaaaaggtaatcatacctcactgcagccttgaactcctgggcggggttcaagcagtcttcctacctaaacctcccaagtagctaagactgtaggtgcacgccaccatgcctggctaagttttgcttttttttttttttttaagagactgagtctcattgtgttgcccaggctagtcttgaactcccggcctcaagcagtcctcccaccttgtctacccaaggactgggattaaaggcataaaccactgcacctggcccagtctcctttttgttacaacttcctccagctctgttttgctctggtgtgagacatgagcatggttcattaagaggcttggcccccccagccccaggaaagaacaagccaacaaccgataggaatgtagtactgtttttagtcctttcctcaggactggtttgtctgcataagatgagtaactacctgcttccaggtgagaagaagacatttaattttagagtagtccagccaggaagctgagatgtcattcttatcaaatccgcagtttcttcagaagacttgaggcctggctgagattctgtagtcccaaattggagcagtcttgagacatccaagattcttcggttctcattttagacttgccgtctctctcacaaagacccactgttttctctcacaggcaggcccccgccacttaaacgtgctgtgcgacgtgtctgggaaaggccccgtcactgcctgtgactttgacctccgcagcctgcagcctgacaagcggctagaaaacctcctgcagcaagtgagtgccgaggactttgagaagcagaacgaggaggcccggaggaccaataggcaggccgagctctttgccctttacccatcagtggacgaggtgggtgccactgtttccatactggagaatctcagtgaagactctgagagtcatgtggacaattgtgttgttcattattactatatagcagcccatggtgtcagggctcacttgtatgatttctggggcctcgtttttcactcaggcaagcctgtgtgtcatagcagagccattattgattatcacacagatgggattctgataataataacaactggaattttcatagcactttacaaaatatgttcactaagagcatctcatttaatccccaaatgtttcaagggtctacatgtagtaatcacacccagcaagtcaaaccatcctattatttgaggggatgtgtggtcactaatccattgagacatacattacttaaactttgatgttctttagtgctttgttactttctttttaatggtctctatgagcaaccagagagacctgctttgaaaacatttcaggctaggataatcacagcccatgctcccaatgtatagaactttgggatcttgattgtttacttcttcatttattggagctgactgacaacaataggataatgtagactttgcctgtggtcactgcctgaggcactttggatgaaatgagaggtgacgattattcaagccttttgtctgtttgaactccttatactgtataggaggctctcagttttcccctctgcgtgaggttatctacacttctgggtcttgccagaacagattactgctatatctctgctgtccaaatggtattgaaagttcagttggaa

SEQ ID NO: 15562 - DNA, 74409 bp, Homo sapiens
cccgaggctgcggcggtggagccgctggacgcgcggcggctcctgcgctgggcccggcgaggtcctccccaagaatctcggtgctcctggatgtcctcagccgccggggatcccttccccgaacaacctcgcccgctccgccctccaggttcttacaggtggccgggtcccagaagggtgataggcgcctgggtaaccgtgttgggcgcgccacggagtgtctcataaacggctccttcctttgaggcaagtctgagcgcggggggaagaagtgaagtggctgaaattagagttgcgtttgaggcaggctgcaagccttctgtcgtcctgagcaaggctccgtcctcgcctgcttcattattccagaaagagcttggctcctggtggcatcgctatttttataccctggtccaaaggagccatgaagtggaaaaagtgattttttaaaaaatctacacttaaataaaccaaaagaaatggcctgtggctgacattttgagatttacagaactccagcaaaaagctaaggactgggggatcccaactcaccatccaattcctaatcaaagttgcacaaactaaatatgtaagcacatttactgctcaaagttctcagtaaaggtgctttaactgcagtttttcctccactaaaaactgctgacaagtaattgggacatttttgtcttgccctgagaaagctagactgtctagttaaaagataataggaaactcattctaaagtgtcaacttattctattgcccacagggctgtccgatttgttaatcttcacttagctgagcctgtgaaaggtggattccaccgtaggttcatctttgtgctgttagtgtgtgaagaggtttgaacaaggaattaaaagcctagaaaaacaaggcgataaggtcttctagagggcatatcgagctttattgacgattttatttccacttgatacgtgactgccagcaaactgtttctcttaccttactatttcgtcatctgtaaaatgagtttaattatttatgtatattgcatattaatgttggaggccaaaaggtactagtcaaaaggcataaagaggctgggtgccatggctcacacctctaatcccagcaatttgggaggcccagatgggaggattacttgagcccagagtttgagaccagcctgggcaacatagtgggacccctgtggctacaaaaaaataattttaaaacattagccaggtgtggttgcatgcacctgtagccccagctattcaagaggctgagacaagagcatcgcttgagcccaggaggatcacagctgtgatcatgccactgcattccagcctgggtgagagagtgaaaccttgtctcaaaaaacagacaaaaaaaaaaaaaaaaaagcaaaaacaaggcatgaagtatatcagggatctccctatgggaatttttttctacattaaggttcatagctgttgcatgccaggaggggtaattcattcaaggagtatagggaatcaaactgaagttactgatgggtgtattatttgctatagctcctgatcctctgtctttgtgaattttagatcaggaagtgtgactggggcagaaagatgttagaaactatggggttgggcagggttgatctggggtgagtggccgagacccggactaatcctacaggcagtcttgcaagcaactgcggggtcggtgtcacctgggggttaagaataaaggccctggttagtgtctgatctgcttgcaaattggctctctgctacaaagtcactgtgcaacattggacatgttacttaacttctctaagctttggtttctttatgtgccaagtagagttgatcatagtacctacttcttatgactgtggggaggattaaatgaataataggtacaaagtccgaattgccaagtgctggatgtgtaacatacacattggaatttagagacagtacagaaaaaataatgcaaaatgtcttgttaatgattttcatgttgattgcatgttgcttgtagtgtctggctcagaataaatggtgaataattcttagttgccatcattaacattacaatcagcttcactgctgtcattatctccatcatcaccatctttgagagcctaagatagaaaggtaggaaggaaagctgaagttggagagcttcaggcagagatcagtttgggttaggtatggagatgccagtggctggctgggagctttcttggggccagtgtttctccgcctgtgccttccatctggtgctgagaacccaaaacacattcaatggaagaaaatatgtgatgaaatctgatcaagaagagccccctcaagtttaataaagtataaaaggttctataatcctcaggcaagaaaatggattggaaattcgtattcttagagttctgttttcctttttgaagcactctgtgtgttgtgtgggagagttatgctaaggagcttggcagaaattattattcaaaggagcagattaataaggacatacctagtattcatatatcatttaatttcaccatttattgtttacttattgtgtcccagacactatattatacagttaatggattttatgattaaattctcacaaaaagcctatcaaactcatgaagtcttgtacagaagaggaaaaggaatcttggagatacagctgcacaaggccatgtaattttttcaagaccatacaaccagcaatggcagagctgggattgcaaactgctccaaagactgtgctcttaattgggccgattgttattttgatgcatatgtatcccaagaatttcctttaaagcaagaggggaattaatttttaaaaaatcatcattttggtagcagcattggcaaagtgttctgtttctgattagtgtttaatatataaacattaacaatgtgatgttttgcaatgttgaaggtggaaaagaaatgttttcccttacgtgcctacctattattttttttaaataggtcaaattccaaaagtaagactgtgttgaaatatggccattagtacattcagcatgtgctcatgtttttcaccttactactcagaatagtgtaaactatctcttaaaaatatttgtgggataaaaccagtgtgcttcctgttaatgaagtattcaaatctgatatattaaaaatattatttgtaaagcgttcagttctgaccacaccagtctccagaaggagtgagcagactatctcacagtctgagaagaaaggtgaaattaattttcttgtaagtgctatatacttgtcttcatttccatttttttgttgctgacttgcgtgccaaggaaagactagatctaagttaggcagttcgtaataacatttgcgtttgggatttcaggtgctgctgcattaaatgtcataacatggtacttgtgggaacatctagtcttgttaattgccttttttcttactggaatttagtgcctttgtagattataaaaattattactagtactctgaaaatttattaaacaaaatcttagtgtctttcaaatacagaatagatgtaaaatttgatcaaatattaaagtaaaataagaaccttggataaagaggacgaaagtgtagaatgcagaaaaaaacattaaccctcttgtggacagtcaggattgaaaggaagaaaaaataatggcttacacttctagaatgctttctatgtggcagagacagttctaaatatttacatatcgtaactcattcacctctatgagataggagcaatgactatctccgttttacagatggagaaactgagtgcagagaagatatagaaattgtccaaactcacaaacaactaattaaggtcacagctgagattcaaatgcaggcagcctggctccagagtcttctcttttaatcattataccatgctgccatctcagttttattttaaaataataataggtaacatttattaattatttactatgtgctacatattgtgctaagaactttatataccttcatttcgtcctttcagaaaaggaacaaacagagctgggtgcactggctcacgcctgtaatctcagcattttgggaggccaaggcgggacgatcacctgaggtcaggagttcaagaccggcctggccaacatggcgaaaccccgtctctactaaaaaatacaaaaattagccaggtgtagtggtgtgcacctgtaatcccagctacttaggaggctgaggtgggataattgcttgaacctgggaggtggaggctacagtgagctgagatgtgccactgcattccagcctgggcgacagagtgacactctgtttcaaaataaaataaaataaaaaataaaaaaggaacaaagtattaggcataataatcatcaccagagagtgattttatgaaagacaaaaacaaggtggcaagaagagagaataaagttacataaagatagcatttaagaacaaccacaggctgggcatggtggctcacacctgtaaccctagcactttgggaggcctaagctggtagatggctcgagcccaggagttcgagaccagcctgggcaacatagcaaaaccctgtctctacaaaaaatacaaaaattagccagctgtggtggcttgcacctgtagtcccagctacttggaaggctgagatgggaggatcactcgaacccaggaagttgaagctgctgtgagcagtgattgcgccactgcactgcagcctgagtgacagagcgagactctatttcaaaaaaaaaggaacaaacccaataattttgggcataacgaccagagcacaatgagctacagagagctttctgagaagtatttgctaattttatctgcaaagataatacaagcataaaaatatatgtattcaaatgtatagatgtgtatctgcagtgagagcagagctgttcctcagtagtgggggtggctggcagagtgaggtagtgtgctttcaggaattgctttatttgtctgatgtgttctagaccaaagaccaacagaggggcttgggcaatcagacacagaatttttggcctttcacatttagaatcggttccttccagattcttggaaaaggtccatttgtgctttaggcatctagtgctattctgaagatgccttacaaaatgtatgctgaaataaccttctaccagggtgaattttcttcatttggagttctttgagttctgaccatttatgtatattgatgaagctaatgtttacttcttcatagaccagtggaaagaaaacgtagtaacatgtagttgcccagggaaagatgaagaactcaggggaccaagtctcccatctcaactccccataaaggtagtgatggaatgggatgatgttaaaaacacctcaactttccgtcctctttaagggaccgtgagaaggtagggatgttaccatactcagacttcttgctgagaaagctaagaaacaaaagcatttagtttttttcagtggcaggtgcttattaacgtttggcctatttgataaagggttaaagcaacaggaatgtgctactgctgttcccacaagcagtagtctaatttctttctttttttttttttttctttttttgagacagtcatgctctgtcgcccaggctggagtacagtggggccatctcggctcactgcaacctctgcctcccggattcaagcgattctcctgcctcagcctcctgagtagctgagattacaggtgcgcaccaccacgcccggctaatttttgtatttttagtagagatggggtttcaccgtgttgttcaggctggtctagtcttacccagtcagcagcagaaaggctctctgggctctaggtaaacacatgaaatttatatagtgtgtttaagtgtggttcctgtgcttctggagttggcacagtagtggtaccatttgctgtatcgacaacagtgggggtatagacgaaaaacagattgacacctctgaaagtatatatgaacacatgtcgatgcagcatttctggtgaaactaagcaaattgataaagttggcctagggtacaagacattatgtcatgtcccactgcattatgattaaacccaagattagaaaggagaaatgatggcaacagaaccagtttctccagctgtctattctcatgttcatcatcacagataggaaagggcagccggccctctgcatctgtgggcacatccctggattcagccaaccacagatcaaaaatatttggaaaaaaatgtagatagttgcatctgtactgaacatgtacagacttttttcttgtcattattccatacaaaatatagtataataactatttacatagcatttacattgtgttaagtattataaataatctagagatgatttaaagtatacaggagggctggccaccgtggctcatgcctgtaatcccagcacttttggaggccaaggtgagtggatcacttgaagtcagaagtttgagaccagcctggccaacatggtgaaaccccatctctactaaaagtacaaaaaaaaaaaaaaattagccaggtgtggtggcaggtgcctgtagtcccagctactcaggaggttgaggcaggagaatcgcttgaacctgggaggcggaagttgcagtgagccgagatcgcaccactgcactccagcctgggtgacagagtgagactctgtctcattaaaaaaaaaaaaatcatgaacaactctgcatgtaaatcaatacagagctgcattataatttacataggctgtataaaatcctgttgattagatgtaaaatgatttattaaattaattttctattattgggcatgaagataggttccaggctgggcacagtggctcatgcctggaacctgcctcccggtgctttgggaggcagacacaggagaatcagttgagcccaggagttcaagaccagcctgagcaacatagtgagacaccagctctacaaaaagcaaacaaaacattaggcagacagggtggtgcatgcctgtggtcccagctacatagaaggctgaggtgggagggtcacttgagaccaggagtttgaggctgcagtgagctatgattgcgccactactctccagcctgggccacagagtgaaaccctgtctcaaaaaaaaaacacaaaaaaccaaaagagataggttctgacttttcacaatagtgtatagagtttgatggagcagtcttatacatacttttttctgcgctagtgcaaacacctccttacaaatttctaacagtataattggtcataggaaagaaacatttttcaagcttttgattgccaaattgacgcccagaaaaggtatacctgtttctgctcctaccagtggccctacgaatgctcctttccccacattcacacccccaccgagttttatcattcttttaaatctttatttgccagtgttgacctcttctcttaaatgcctgtaacctcttcctgtttagcttctctcctaggtcagagagtgaactctgaagtcattctttagggattaaaatagtcatgcatttctccttttttctttgccttacatgcaaccataaatggtgagaacttctatcctttttcactttctgcttctgttcctttaataggtggattaatgataaaggtagattgttcaaacaacttagttatttcttaattttgttgtaagctctagttgccagactttaaactgtgctttttactttgcttaacaatgtaatccaatctacctcctcctttgggtgcctaagccatagcccttttaaataaaatagcaaatggaaaatcagaatccctttctatcgcaaaataagagtccagattacataactcattgtatgtgttttcacttggatgagagaatagagagtatggacctctttcatactttttttttaatgttccttttcctctagaattggtttctggggctaaaaggaaacagtagttagtaccactctgctcagaaacctcaaaaaacttcgacttctgtcattctcatcaaagggcaaaattcattgttcttctgtgatagagaccaaaaatacaaatagctaaactggaactaaattaagaaaaacagaagttaataaactccaccgcctcactcccatctcttcgtaagttagtaggcttgtaagtcctaggctggttagttcattcatttgttcactcatgccagccattgaggattattgtgttctaagtgctgtgctaagccccagaaatacaaagacaagtgagtcatgggcctgcctgcaaggagtgaggagatttactcaaaattgagagctggaaaaagaaaggcactttccctggcctcatagccctccgtgacttcaaagtattcctctctggggtcatgccactagggataatagcattatccaaaaacatttttggaaatccttttagaattattctcagggactggagtacatttatttttaaaaagaaacttggtgttttaaaatctttttttttttttagggagaatctgctttattatttgagaagtttcaaaaaatatagaaaatacagatgataatatggcaagtatctaaaggtctccacttaacagaattaacatctgttaacattttgtcacttttgctttagttgttttttttttaattaaaaaagagaacattacagataaatgtgaagtccctgttattctgttgcccatttctgttctccctgctgctccctgagagtactaacacaaaggtgtacttctggggtgtgtgtgtatatgcatatccataaacaatatatggtatagcttctggagggatccaaagtcattagcactcaagcaagcctattaaataaaataatatcagcttgagttaaagataacatatagccgtgaaataacggagctgatttttaggtaccttgtcaaatagttctgaaagtaattgcaaagaggagttccaaaagtgagttcagaaagacagctttatcagaataaattgcatggtactgcatacaggaaactataaagaacaacggttatttagaactgttcattctgacagtgtttttcaattactccttaatattataaccacttactcatttcctgaaatcaccaggaaatttttcaaaaagatttttctcccccgatgaatatacccacgatttgcatttgacccaagataagcagttgagtcgataacatgttaatttttaaatacatggttttaaaacacagaataaaaattctacctcattgcttggagactcaattaaggagagtatgcacattagcaaaaagaagatgtgatatttgctcagaagtcttgaagtggatattttggccttcgtatggctgaatggtcaagcttgactctctcgtttgctcagggaggcccagtccctctgctgccacgggtagaaatactttttcctaaatcgctgcttcttctcactgccatacagagcaatattcaggacacagccaaaaccttctttggcagacctttttgagttctctctactcagctttctgctgtgtaatatgagcactctagagaagttgggctgtcctcaggaaattacacttggggtctgtggttccccaggaagacaaactggagctccctaaggggtactagtcatcatacggcatttatactagcattgcagtccactttcacctatgcaagtagaaaaactcaggctcaaagtccactgacaatgcaggagtcccttatctgctggttaacataaatgttgttttaagatgatggccatctgttgtctgtgagaacaagactatcacccacctgttgacatgctggctggtttaatatcttactctttcattccaaataactacctggtctcacagatccccttagatggggtatccaatttacctcctgtaccttattctctgtccaataatttcactcaaatcaacaagatattttattgcctatgacttcctctaggtattacgggagattcaaaacacaaacagacaagcagcctatgccctcagaatccagctggggtgagtgggtgactataaatgcaaaagttagagagcatggggaacagtgtttgattgtgtggctggggaggggtaaggacaaaaactcagagagagagaagcctgtagccctggctacagaagggcaacacctctgaggagatgagtctcagctgggccctgaagggaggtgactcacagatgaaacaaacctggtgggaagaatagttagcagtgtgcagaaggcattggaagggattccaggggaggagtgaggagggagccacagtcattccgatgtgaggtagtgagatctgggattagactgggtcatcagaatggaaaaaaagggcctgcttctgcagacagtttaaaggaatcagctggatgtgggaagcaactacatacttattcattcattcatttcatgcatattgcttatagcctactatgtgcctagcactattctaagtgctgaggatagagtcatgaataagatagacagggttcttattctaaaaaaagtaatataccagtggggagacaatgaagaaataaaccactaaataaacaaggaaacatcagataaaataagtgtgatacagagaatgtaaacgggccattgagagggcatggattctttagatgggatggtcaaggaaagcatctcttagagaaaaacctctgagccaagatcaagcaggggaatgacgaagcacatgactgaggcaggagtaaatttgatgtgttggaagaaaagcaagaactggtctgtctctagtggagtgaatgaggggagaggaggagagctgaagagggaagttagcaaagaacgaatcacataaaagccttaaaggcaatggaaaaaatttaaatgttattcaaagtgcaatggtgtattagtccattttcatactgctatgaagaaatacccaagactggataatttataaagaaaaaaaggtttaatggacttacagttccacatggctggggaggcctcacaatcatggcagaaggtgaatgaggagcaaaggcatatcttaaacggcggcaggcaagagagcgtgtgcaggggaattgccctttataaaaccatcagatctcgtgagacttattcactatcatgagaatagcatgaggaaaaacctgcctccatgattcaattatctcgcacaacatgtggggattatgggagctacaattcaagatgagatttgggtggagacaaagccaaaccatatcaaatgggatggtttatggagcagggcatgatgcgattgacttttgtgtttaaaagatctattgtacaaagaagcaaggaaaccagctgggaggcagtggagaatccaggggaaagatgacgatggcaaaactagagagcagagctgagaaggagagaaccaggcagctctgggataacattctggagctagggctgacgaattagatatggggtggggcaatgaaaaacaaaaaaaaagagaaatcaagatgtctccagggttggatattgatgcttttaacagagattgaaaagactggaggagaagcaggcttttagggtgaatcaagggtttaactggggacatatggagtctaagatgcatgttagacattcaagtagaattagctactatgcagttttatttaggaatctgaaactcaggggagaagtcaagactggatatttaagtttgcaagtcaataccaaacatatttttacataagaaggaaaaaatattgatatgattttgataagtttttaatagccagaaagctatatgcgtaatatggtatcattttaattaaaaaataaatatatgcataactctctgcagagataaatgatcaatacatataacaaggagagaaccagaaggacatacgccaatatgtcatgagtgttatctctgggtagtagaattattgatgacttttgtgtacttgggacatgcatgtatgagtgtatgtatgcatgcatattttgcaagttttcctcaaaggatgcttttgtaattggaagaagaagcaattataaaataaatggcacaagatttccatcctggtcaaatgggataaggatgatgccaatgagaaattatgaaaattggaaattagacttagttttggggggatgattttttacttccctcgtagaggttttgtttaagacgatgtagtagactgtacctttacatatatttgctgtccctcccgatgggaggattttacttttcacctgttgaaggtgatgtggtcacttggaggtgaagagatagcctggactttgtcacattatctttctcctattctaaacaatctgcagcgttccaggtggtggatgatctgtcatcctgcatcctggagtaaagatgattaaagcagagctgcagctgccctctgaaggcctttgtttttgtaaaccactgagatttttgaattgtttgttatctcaccataacctagcccaccctaacacagatgaacataaaatacagaacatttctattgggcggcttgaaatacaggcttggggcatcagtggtaggtcagcatggaaaatgttgattaaaaagtcatctgtgaggtggagattgggactgaagaatggataaattttctgaatggaaagtataaggggaagagaagaggaatgggcctagaggaagagtcactgtcaatccatacaaaaagaagagatacgaaaagataggaggggggatttggccaacacatggcagaccgttgtagtatcagaaaagagagctaggagggtagttacaaagatcacatgccaaattatgagggcaaagagccattggatttaccctgaaggtggtcattgaaaacctctgaattagcagttttagcggagctgtggggaaggaagtcaggtttcataaggttatagagggagtccatgcagaggaaatagaggaagctggtggaggccactcctttaaaaagcctggatgaggccgaagagaaatgggacaagtggtaaccagaaggcccctacaaggctgtgacttttacacaaatatgacatacaatgctgaacaaaggatgtgctgatcttacagaggaaggatgtgttttattcccaaaaaaaactttacatatgggtaaagttattcaagagaccctgtgctgtctaatatgcaacaaatttttctttgcaccagcattaagacttctaacaataagtaaaatattctatttagatactttttacaggagattttgaaactctgatgacactgacatactacctttcagaacatggtactgtttaaaattttattatttttatatttatcttcatatgtttaaatttgaaaaattacaggaaagagtacttttataattatgtttttctgtttacaaaccacctcctgtgtgctgaattttgcctccccaacatttttcaggggagcatggccctactcgcactttgagttcagatttctggccttcagaactctgagaaaataaatttcttttgttttacgctatccagtttgtggtagtttgttacagtagtcctgggaaactaacaaaccaccccaaagtttagtgacttaaaacagccattattatttctcacaattctgtgggttggcaatttgggctgggctcagctggacagttattctgctggtcttcctgtagacattcacatggctgccattatcgggtggctcaagtgaagctgtagggtctaagatgggctcactcacaagtccaggaccttggtgctgactgttggctgagctttccctcttcacacggtctcttgttgttcagaaacctagctggtcttttttgcattcttagctggtaaagggaacattctaagagaaggaaggtggaagctgcaaggcttcttgaggcttaagtctagaactctccaacgtcacttccaccacattcattggttaatgcaagtcataaggcaactcagcttcaaagagtaggagaatagaatcaacctattgaaaggaggggctgcaaaatagttggtcattttaaccaaccacagcacccaaccaaaaaaattaatactatcccgtttcagatttcagaatgtttaatcagaaggccttgtctttccctacgtatatcacaatacccattttagtggcagagaaactgagaccaaataaaactgactcctttaaagttaccaagtgagtcatgctttgtgagagacatgaagacaactatatgtctggaagagctaaacatagtcctgcctggaggcaggtatatgaacttaataatcccttgagatgctcttaaatcccataattacactgatggactccagattgcagagctgtctggtccagagataaagcagcggtttgagagtatcagagagagaaggtgcctgaaaattgccacatgtccccaaaggcaggatttgaggctaaattaaatgataaagagttaccaagctctttattctcaagagttaccaaataagcttagaaactcaatgactgctgctgtctagtgttagttctggaatgggagaattaaaaatgagtagaaaaagaaaatagagacagagagactaacatatctgaaagataggtgctgtgggcagtcttagaaggatcacccctatatcaattaggattgcttttagctgctgcaagtaacagccaaccaaaccatccaatggtttaaacaaattaggggtttatttttttcttttcatttatttatttatttttaaatttaattttattattattattatactttaagttttagggtacatgtgcacaacatgcaggtttgttacatatgtgtacatgtgccatgttggtgtgctgcacccattaactcatcatttagcattaggtatatctcctaatgctatccctcacccctccccccaccccacaacagtccccggtgtgtgatattccccttcctgtgtccatgtgttctcattgttcaattcccacctatgagtgagaacatgcggtgtttggttttttgtccttgcgatagtttgctgagaatgatggtttccagtttcatccatgtccctacaaaggacacaaactcatcatctttatggctgcatagtattccacggtgtatatgtgccacattttcttaatccagtctatcgttgggcatttgggttggttccaagtctttgctattgtgaatagtgctgctataaacatacgtgtgcatgtgtctttatagcagcatgatttatagtcctttgggaatatacccagtaataggatggctgggtcaaatggtatttctagttctagatccctgaggaatcgccacactgacttccacaatggttgaattagtttacagtcccaccaacagtgtaaaagtgttcctatttctccacatcctctccggcacctgttgtttcctgactttttaatgatcgccattctaactggtgtgagatggtatctcattgtggttttgatttgcatttctctgatggccagtgatggtgagcattttttcatgtgttttttggctgcataaatgtcttcttttgagaagtgtttgttcatatccttcgcccactttttgatggggttgtttgtttttttcttgtaaatgtgtttgagttcattgtagattctggatattcgccctttgtcagatgagtaggttgcaaaaattttctcccattctgtaggttgcctgttcactctgatggtagtttcttttgctgtgcagaagctctttagttgaattagatcccatttgtcaattgtggcttttgttgccattgcttttggtgttttagacatgaagtccttgcccatgcctatgtcctgaatggtattgcctaggttttcttctagggtttttatggttttaggtctaacatttaagtctttaatccatcttgaattactttttgtataaggtgtaaggaagggatccagtttcagctttctacatatggctagccagttttcccagcaccatttattaaatagggaatcctttccccattgcttgtttttgtcaggtttgtcaaggatcagatagttgtagatatgtggcattatttctgagggctctgttctgttccattggtctgtatctctgttttggtaccagtaccatgctgttttggttactgtagccttgtagtatagtttgaagtcaggtagtgtgatgcctccagctttgttcttttggcttaggattgacttggtgatgcaggctcttttttggttccatatgaactttaaagtagttttttccaattctgtgaagaacgtcattggtagcttgatgcggatggcttgaatctctaaattaccttgggcagtatggccattttcacgatattgattcttcctacccatgagcatggaatgttcttccatttgtttgtatcctcttttatttcattgagcagtggtttgtagttcttgaagaggtccttcacatcccttataagttggattcctaggtattttattctctttgaagcaattgtgaatgggagttcactcatgatttggctctctgtttgtctgttattggtgtataagaatgcttattatttttatacattgattttgtatcctgagactttgctgaagttccttatcatcttgaggagattttgggctgagacaatggggttttcaagatataaatcatgtcatctgcaaacagggacaatttgacttcctcttttcctaattgaataccctttatttccttctcctgcctgattgccctggccagaacttccaacattatgttgaataggaggtgagagaggacatccctgtcttgtgcccgttttcaaagggaatgcttccagtttttgcccattcaatatgatattggctgtgggtttgtcatagatagctcttattattttgagatatgtcccatcaatacctaatttattgagagtttttagcatgaagcgttgttggattttgtcaaaggccttttctgcatctattgagataatcatgtggtttttgcctttggttctgtttatatgctggattacatttattgatttgtgtatgttgaaccagccttgcatcccagggatgaagcccacttgatcatggtggataagctttttgatgtgctgctggattcggtttgccagtattttattgagtatttttacatcaatgttcatcaaggatattggtctaaaattctcttttttggttgtgtctctgccaggctttggtatcaggatgatgctggcctcatcaaatgagttagggagtattccctctttttctattgattggaataatttcagaaggaatggtaccagctcctctttgtacctctggtagaatttggctgtgaatccatctggtcctggactctttttggttggtaagctattgattattgcctcaatttcagatcctgttatttgtctattcagagattcaacttcttcctggtttagtcttgggagggtgtatgtgtcgaggaatttatccatttcttctagattttctagtttatttgcaaagaggtgtttatagtattctctgatggtagtttgtatttctgtgggatcggtggtgatatcccctttatcattttttactgcgtctgtttgattcttctctcttttcttctttgttagtcttgctagcggtctatcaattttgttgatcttttcaaaaaaccagctcctggattcattaattttttgaagggttttttgtgtttctgtttccttcagttctgctctgatcttagttatttcttgccttctgctagcttttgaatgtgtttgctcttgcttctctagttcttttagttgtgatgttagggtgtcaattttggatctttcctgctttctcttgtgggcatttagtgctataaatttccctctacacactgctttgaatgtgtcccagagattctggtatgttgtgtctttgttcttgctggtttcaaagaacatctttatttctgccttcatttcattatttacccagtagtcattcaggagcaggttgttcagtttccatgtagttgagcggttttgagtgagtttcttaatcctgagttctagtttgattgcactgtggtctgagagacagtttgttataatttctgttcttttacatttgctgaggagtgctttactgccaactatgtggtcaattttggaataggtgtggtgtggtgctgaaaagaatgtatattctgttgatttggggtggagagttctgtagatgtctgttaggtctgcttggtgcagagctgaggtcaattcctcggtatccttgttgactttctgtctcactgatctgtctaatgttgacagtggggtgttaaagtctcccattattattgtgtgggagtctaagtctctttgtaggtcactaaggacttgctttatgaatctgggtgctcctgtattgggtgcatatatatttaggatagttagctcttcttgttgaattgatccctttaccattatgtaatggccttctttgtctcttttgatctttgttggttgaaagtctgtttcatcagagactaggattgcaacccctgcctttttttgttttccatttgcttggtagatcttcctccatccctttattttgagcctatgtgtgtctctgcacgtgagatgggtttcctgaatacagcacactgatgggtcttgactctttatccaatttgccagtctgtgtcttttaattggagcatttagcccatttacatttaatttaatattgttatgtgtgaatttgatcctgtcattatgatgttagctggttattttgctggttagttgatgcagtttcttcctagcttggatggtctttacaatttggcatgtttttgcagtggctggtactggttgttcctttccatgtttggtgcttccttcaggagctcttgtagggcaggcctggtggtgacaaaatctctcagcatttgcttgtctgtaaaggactttatttctccttcacttatgaagcttagtttggctggatatgaaattctgcattgaaaattctttcctttcagaatgttgaatattggcccccactctcttctggcttgtagagtttctgccaagagatcagctcttagtctgataggcttccctttgtgggtaacccgacctttctctctggctgcccttaacatttttcccttcatttcaactttggtgaatctgacaattatgtgtcttggaattgcttttctcaaggagtatctttgtggcgttctctgtattttctgaatttcagtgttggcctgccttgctagaatgggggacttctcctggataatatcctgcagagtgttttccaacttggttccattctccctgtcactttcaggtacaccaatcagacgtagatttggtcttttcacatagtcccatatttcttggaggctttgtttgttgctttttattcttttttctgtaaacttctcttctcacttcatttcattcatttcatcttccatcactgatacccttttttccagttggtcacatcggctactgaggcttctgcattcatcacgtagctcttttgccttggttttcagctccatcaggtccttttaggacttctttgcattggttattctagttatccattcgtctatttttttttcaaagcttttaacttctttgccattggtttgaatttcctcctgtagctcagagtagtttgatcgtctgaagccttcttctctcaactcatcaaagtcattctccatccagctttgttccattgctggtgaggagctgcgttcctttgcaggaggagaggcactctcatttttagagtttccagtttttctgctctgtttttttcccatctttgtgtttttatctacctttggtctttgatgatggtgacgtacagatgggtttttggtgtggatgtcctttctgtttgttagttttccttctaacagacaggaccctcagctgcaggtctgttggagtttgctagaggtccactccagacgctgtttgcctgggtatcagcagcggtggctacagagcagtggatattggtgaaccgcaaatgctgctgcctgattgttcctctggaagttttgtgtcagaggagtacctggctgtgtgaggtgtcagtctgcccctactggggggtgcctcccagttgggctactcgggggtcagggacccacttgaggaggcagtctgcccgttctcagatctgaagctgtgtgctgggagaaccactcctctcttcaaagctgtcagagagggacatttaagtctgcagaggtaactgctgtctttttgtttgtctgtgccctgcccccagaagtggagcctacagaggcaggcaggcctccttgagctgtggtgggctccacccagttcgagcttcccggccgctttgtttacctaatcaaacaactaactcggcaatggtgggcacccctccccaagcctcgctgccgccttgcagtttgatctcagactgctgtgccagcaatgagcgagagtccatgggcataggaccctctgagccatgtgtgggatataatctcctggtgtgccgttttttaagcccgttggaaaagcgcagtattagggtgggagtgacccgattttccgggtgccgtctgtcaccctttctttgactaggaaagggaattccctgaccccttgcacttcccgggtgaggtgatgccttgccctgcttcggctcacgcatgttgcgctgcacccactgtcctgtacctactgtctggcactccccagtgagatgaacccggtacctcagttggaaatgcagaaatcacccgtattctgtgtcgctcacgctgggagctgtagactggagctgttcctattcggccatcttggctcctccccttatttatttttttcttacataacaagaatgccagtggttggccctgcaggcttggtgtcatggcccccaaggtaccactggagactctggttctttgtgtctttgtgtcccaccaaccttagtgtgtggctttcatccttatggtcacaggatgactcctaaaactctgtacagtgaatcagtattggagacaggaagaagaaaggaggtaaaaaagacatgccagctaactttgctcccattaggaagctcttctagaagctcacagaattacatttgtttatgtatttcattattcagagctgcgttagctttgtctacaagggagattggcaaatgtagttttcattagcccagcacattgtcacccccaacaaaactagggttgagttagaatgaaggggctagtgcatattgataggccactagtagtttctacacagcctccaacaattgctgtggatgtagattagtaacagaacttccactatggcatcatagcacctctatcccactagtacctgtagtaggtccaaatcatctaattccaggagcctggcttaaagaagaggaatattgaggcttctaggtccagtattaatcaaggtaagctagctgtgagaacaaacaatctcaaaatctcagtgaacgaaaccaacaaaaacttgtttcatgtttatatcacagtctgatgcagatcgagtggttctcctccaagcagtgactcagggacccaggctgcttccatcttacagctctaccatcttgtgactttcagattatgttggcatcattcagccagtgactaggaagaagagagaatgaaagattgtgcacccaattcttaaatacctccactcaacactgggacacatagcttctactcacacttccctggggaggactgcttacaagattcatcaatctgcaaggagggctgggggaatatattatagttcttgcctggcggcacttccagcaggaacacttcactatgaaaagggagcacaagtctttggggggacagctagccttctgtgccacaaaagcccagtcacaaagaaaaagccattaccaaaatgttccataaacaatgtagacctactgtggtttgctgttgtctgatagataaaaactgtgttgttttagtcacaaggatttggatgtgggagctgcaaggaaagcaaaagccaaacaagtacagctgaagcacctgagatcctaggaggagacaagaagaatacaaggtgccattgtcctatcagccaggcagaaagatggtaggaaacaaggccatttaaaatctaattgcaattgcaagggctgggtgctgtggcttacgcctgtaatcccagcactttgggaggctgaggcaggtggatcacttcagctcaggagttcaagaccagcctgggcaaagtggtgaaacctagtctctacaaaaaatacaaaaattagccaggcatggtggcatgcgcctgtagtcccagttactcaggaggccaagatggaaggatcaattgagcctgggaggttgaggcttcagtgagctgtgattgtaccactgcactccagtctgggtgacagagcaagaccctgtctcagaaaaaataataataaaataaaatctaattgcaggcaaggccacaggaagtggcaagtgcaactaaagacttcctagaaatcccacacattgataagcagccgggttgttcagccagtttttttttctgagaacaaccaattttaaaatattttaggaaaaaccacaatattgagatatttttaaacagcttatatttaaacagcatatatttaaacaaagtgattaatttagaattcatattttatttgagaaaaaaacaagatgttcctggtctggcagatgacattctaaattattcactcccacttgtggaatagctgagttatagtccggcccctcctctgtagaggaggatttataggagaagatgagtcacgttactttttgtgactatttttctttgcatttgttgactcctcttgttttattcaccttctaatcattgaataatctgtacaatcagactgccttattcatgttggcagttgttttaataataacaatgcacagagccattgctactaacagaaagcagggcagacctttgagtctgagtttggggatacaagtttgattccatcccagctccactgattcccagcgagatgtggttcaacatcataggaccaaatgaaataaaaagcgtgaaaatgctacacaaatcaaagagtgctaaagacatattaatgaaacatctgtaaaatgggaataagtaccacgtttctgaggtagcatgtaatacaactggcacagggttccacacttggtagatactcaaaaaagaaaataaaaagttaacatggacaaagtaaaataaactggaaataggagatggagaaatgttaaaacaacaggcaccataataatgtaaagtaggatttcagctcatttacaagcacagaggttatatggtaagtcctcacttaatgttgtcagtaagttcttggaaacagtgtctttatgtaaaacaacataaaggaaaaccaattttgccataggctaatggatataaacaagagttaagttccagtacatatgtgatggcatatttccagttacaaaatatcaccaaacttctaaataaagaccaaaagactcctaatattaaacattgaaataaatgtgagctatactttcatataagaaaaattaatgcaaacaagtacaataattatttactgagttattccagttcggggtcgtggatggccagagtctatcccagccgtccagggccaagtttggaacccaccctggccaggacgccatcctatcacagcttgcactcacacacactctcactgggaccatttagacacaccgattcacctactctgtgcatgtttgggatgtcaaggaaaccggagtaccctgagaaagcccacatgggggaacatgcacactccacacagacggtggctccagccaggaattgatttattttctcatcaatgttataactaaatgactttgaatgaaacaatgttatttgataacctgctgtatttagagttcacaaaatttatccctctgaaacacatacacacacgcatggccgcacacacacgtgcatgcacacactgcacacacttaatgctaaacttgaaagagatttaaaggctaaaaggaaagttggactttaaatttcccctggagctcacattttctgggtactgaaagatatggtagatacatatgattgccttttccaaaaataacttctatggaaaatcctgagagttataagagactacaaaggtgatttgatagagccacttaagtaatgtatgcaatatgatcaccaggtatacttgtatgagagatgggaaagaaaggaaatattgaaagagcagaaccatgaaggagaagaagcaattgatcctgaagaatagcaactgtagtcagggattagagacctgcaaacaagtttcctattcttttcaaaaatgaagaatagcttcttattacaaaagctgtatatataaattatagaaaagtcagaagtgcaggtaagcaaatactttaaaaatcaaaattatctctaattctttgacttattaatcattttaacagcttgattgatattttttcagatacacacatacatacatacttctacaaaactggaagtatgcttatatattgtatcataacctgcttttttatttaaaaaatatcatgaacaacttttcatgtcattaaatattgttgcattacatttctaatgaatgcataacattccattgtaaggatacagcgtaatttaactcagtctgtattgagctacattgatttccagttattcacattagaaacagtacaccactgaataaatttatgcattcatctttgcttacctctttaatgattcttcacgataaatgctagaaatagaaccacagacttaaaggtctccattgatatgtgtggctcccttgttttcctttgcaaggttttgtgtggcatctgcctttaaaaggttaaagatatttttacttataacatccctgaactttacctcaagtcttggggaaagttattgaaaagtagtttgtattcaaataagtacaaactggcaaggtcaatcttttatacaggttatcagaaacaaatcaacctcataagatggaactaaacccattattatgattgagtcagcaaacttaaagatgtgtttggtttggacaaatactattaattccttaagttccctgtggccacagtttttttttttaatgaatgtttttctgagtaatcttggtcctatttgaggccatcttcatatgcactaccaatatttccagctatacccaacaggtaaactagccctctgtaggcaattaaatgtatattttcctgaagaaagtaaggttatatagaatataagtataaggtcacctagaagagctattaatgtattatggacaatttctttttattgccagagctacatgttacttatatttaagtctgatatttaattctctattatattcccttattattgaattaattaattcatccattcatatgacagatatttcttgagcacttacttgtgccaggcactgtgttagactctggggatttggaaagaccctgcttccctcatgaaacttacattccaatgatggaaacagatcatctgtaagtgcgtaaactaatatatcatgtcagataatgtctcatttccttatctcttaaataaaaaaatattctattccatagggctgttatgagaactgagtgagactatgtggaaattaccatacacatgtttaaaaaatattgtttctttttcctcttatcttttagaaaagggaaaatgattattgtttctttttcctcttatcttttagaaaagggaaaatgatttgtataaatcattaaatactcccttgatattacaaaactagcaaattgttttttgattttattttttaaattgtcacataataattgtacatattcatggtggtacatagtgatgttttggtacatataattatagtgatcagatcaggacaattagcatatccatcatctcaaactctaatcatttctttgtattgggcatgttcaatatcctccctttaagtatttgaaacgacacaatacattattgttaactacctcatcccacagtagtatagagcactagaacgtattcctcctatgtagctgtaatttcgtatcccttaacaaatctctcccatctttcccttccccctacccttcctggcctccagtaaactctgttctactttttacttctatgagatcgaagttttttagcttctgcatgtgagtgagaatgtgaagtgtttaactttctgttcctggcttatttcacttggtgtaatgtcctccatttccatccatattgctgcaaataacaggatttcattttttaatggataccattccagtgtgtatctatcccacattttctttatccattcatttattgtcagacacgtaagttgattccatatcttggctattgtgaaaatgctgcaggaaacatgggggcgcagatgtctcttcaatataataatcttttcctttggataaattcccaggagtgggattgctagatcatatggtagttctaattagcaaattctatattccatattaaaggaaggaataggtaaatttttttcaaattttttattttgttaaagatggagtaatcctcccacttcagcctcctgagtagctaggattacagaggtgagccacagcacctggcatgggataggtaaacattttttaaaatgtttgttttgtttcaggcaaaattaggtatcaactgtttctccacaaagaagagcagcttaagccttcacagcacatagttctgataattcaggtcttcttttgccatttctcaaacatagctatcttgtgttggtacatgcgatctgcagggccttagacgaatcatacatttcatctctctgggcctcagtttcctgaagatgaagttatgttatatggttcgtaaagttcatttcagggctaacttcactttgtccttgtaaaaattatctgcctagtgggtccactccccacctcaccaccccccaaaaaatgactgctgtgctccaacccaagccaatcaaaaatgataaacacttgactgtgacttttttcaagactctgttttacagagaagtggaaaggtctactgtggaatgcttatattttaatttgtcctcattgataggagaggacaaatgtaaactaggagaaatggaaaaaccagtgatacatgtcttgttatgttaaaggaaaaagctagagacaatatgattattaataattattttttaaaattaattcttgcatttattgagcacctgctgtatccctcatatgcattaccttgtataagtcttgtaatagcccaaaaagttaagagtgttcttattctcccaaggatgcagatatggaaactgaaactgagtacggttatgcagtatgtgaggggcaatgctgccacagaaactcaagtctagctgagaccaaacccatgtttttaaccacttgcttcttgcctttgccaatcattgccaccaacgagtcaaaacttacttgttgctggaacatggtttcatcctggccttccacggaatctgttgagcttgttttttttttttttccatatgccataatatgtttagtttcacctcagatgagacagaggatttactttcaagaaagttggacgctgtccactctaaacagtaccagaggtagccttacagcatcagaaaatcctgtggtagtatctcttcatcggaacttggaatatgattttaagagttttttctatcttttcattagagcaggccaacactgacttgatttttctctgaaattagctgtggacaaagattccttttcaaactaaagattctaagcttattttcccccatcactttatcaaaactagaaacaatccattaaaaacactgcccagccttcaggggcttaatcaactcagtggtataaagcatgaaacttgattctgagatccaggagagaatatttggattgccgggaggtgacctttatatgtttctttacgtgtataacaaatacatttcaattcgcgtctagccccttaaaaccagtgcatgtttctgaccctgagtgctactgacattgtgaatcgcactgcaaacagaacacgggtcactgttgttttcctgatctgggaagacatcatggtgtggtgaaagggacagtgcgctgctgatcagacttgggttctgtctctcctctgctaccagtgaaatgaatttcagatgcaaagtggaaagatcaattgtttcttggcctctttgctgagatcaagggaagaagaaagatcagattagttccgtgacagtccaatatttactgactgacccatgttctgtttcatctcaggatttccagggggctccaatttggaccactgcagcggtcccaactgccaacctatgttttcccttcttccctacctttcccctgcagcctcaagtggttccagataaagtgttattccatgtatctcactgtctgaatctagaggactctgatacccaaatgtgtttctcagagtgtgtcaatgaaagggactctttgacccacaatccccctttttcttcacaactccatcatcggcatcctcaaagacaatccatggtgcctactactcctcatcttattgacatgattttaatgtcagctctcgccgggcgcggtggctcatgcctgtaatcccagcactttgggaggccgaggcgggcagatcacgaggtcaggagatcgagaccatcctggctaacatggtgaaaccccgtctctactaaaaatacaaaaaaaaatttagccgggcgtggcggcgaccgcttgtagtcccagctactctggaggctgaggcaggagaatggcgtgaacccgggaggtggagcttgcagtgagcagagatcgcgccactgcactccagcctgggtgacagagccagactccgtctgaaaaaaaaaaaaaaaaaaaaaattttagctctcaaagttttcctccatgttccatgaaaatacactttacaatctagtattccccccaccacacacacacacacacgcacacacatatatactgaaacgaaaccatatccaacttcatttccatttccaattcattcaacattttctattctgttctattgcatttaaaaaacgctggtcacaagccactaaactgatctcagatcagactttaataaatcagactcccccttttatacgcacagagcactctctactgtttcttcctagtacttgtcacaatttgtaagtcctaaatcatgtgattgcctacttaatgtctcccgcaacctgcccctggtgttctgtaaacttcaagaggatatgttttgctcacctttgaatttttagatcccatacaacacctatcatatcataaatgtttaataaatatttattaaaagaattaataaatgaatgtggccaaacctattcaggtctgcatggttcctccctagagttccatcacacttcacagatctaaagtttcctcccagttgtggaggtttgaagctcaaaactgctggaggtgcttcccaccatagctcgtgaaggccctattggtgttttcttcctagtccgtctctagttgatcatgacagatgggccagtgtgttttgaagaagactggctgatgcctcaccaaattctggggacaggtgcctttctccaggggaattcatgaagagactctccaggggcagggcagaccactgggaaaaacaagacccttgggttttctgaccactggccacttgtttttcccacatcaggagagtttatcatctgtgctcatccacctcctgaggttgctttgctggtgctgatttcaggtcccaggcccctaaggtctcacactcactccacaagccacctacacagctgtagttgttttcagccgacagctaggttattttgccttccaagatattttcttttatttatttattcatttatttattttttgagatgaagtctcacactgtcacccaggctggagtgcagtggcacaatctcagctcactgcaacctccacctcctgagttcaagtgattctcctacctcagcctccccaatagctaggattacaggcaagcaccaccatgcctggctgatttttttgtatttttttgtacagatggtgtttcaccatgttggccaggctggtctcgaactcctgacctcaggtgatctgccctcctcagcctcccaaagtgctgggattacatgcatgagccaccatgcccggccaatagtttcttttttgataggcagctcttaaagccctcagaatacatctctaatgatgaaatcatcaggcaacttgacaaagagtgaagaaattgaagggttctctcaatagcatcccaaggaggctgacccacaccctactgcctaccataggctggcttcatgtgctctagtgctgtgaataaaggaaaaaactaacatgttgaagcatttatttagtgccaggaggcaggtactttctcagataccctttttcttctcacataattccaggtcattggcagaatagagatgcaaaccaagaacttgggcagcaccaagatgtagatgctaaaactttaaacttgctggacaaaatgataggggactttgaaataattattcagacaatttaggcaagcaaacaaaagcaattaaaaattgggcatctggctgggcatggtggctcacacctgtaaccccagcactttgggaggccaaggagggtggattgcctgagctcaggagttctagaccaacctgggcaacatggtgaaacctagtctctactaaaaatacaaaaaattggccaggcatagtggcgtacctgtagttccagctacttgggaggctaaggtgggaggattgcttgagcctgggagatggagcttgcagtgacctgagactgtgccactgcactccatcctaggtgacagagtgacacccatctcagaaaaaaaaaatgggcatctggccaggtgtggttgctcatgcctataatcccaacactggaaggccaagtctggacaattctttgaagccaggagtttgagaccagcctgggcaacatagcgtgaccccatctctacaaaaaaattaaaattaaaattaaaaacagccagacatggttgtgagcacctgtagtcccacctactagagaggctaaggcaggaggatcatcaaaactgcagtgagctaagatcgcaccactgcactccagtctgggtgacagagtgagaccctgtctcaggaaaaaaggaggcatccaaaaaaatgttcccttagatccattttttgtctgacagagacaggagaggtgatgaaagggaatgtaagagtatttaagggattatttctttatggtagcagaaggacaaagacatgtttgaaaaatttttaatattgtataaaatgatgatattttcttagtggtcttgttgttgaatccagagattgtggtcatgtagttcataggtaatttatcagttattatttattttttaaagcttttatttatttatttatttattttagagatgaagtcttgcaatgttgcccaggctggcctagaattcccgggctcaactgatcctcctttctcagcctccctagtagctgggactataggcacacaccactgtgcctgtctaatttgtcaacttttaaatgagatcatctgcaagttcaaggaagttagataaagggtgataccacagaaaaaaaatgagatttttctctttaagatgaatattgaatttagaattccttaattaatattgaggatcacatgcgagctacagatagggaatattgagtatttaaagcattctgaatgacctgagtgttttccttctcatgcttattaaaaacatttaccacttacagctgaattggaatatagttctacataaattgttatttacacctgatacacagaaagaaatgtgtttccttatttatcatactattaatttgaatgtgctattctttttttaattgctttaaagtcaattggggaatcagattatgaatatctattttactgcttccacatttcctaagttaatcaaatacgacaagttagtgagcttgtggaatttacttgaatttcctaatcttttaactgagagggtattttcgacagcaaatattttgtagcatccatttgtcattttttaaatattcaaactagttttttttaaaataatgccaagtacacttagtgcctagtaaatgctggccactgttattgctgttatcattattcttttttgtttgtttgtttgagagggagtctcgctctgtcgcccaggctgaagtgcagtgacgtgatctcggctcactgcaagctccgcctcccgggttcacgcccttctccggcctcagcctcccgagtagctgggaatacaggcacccaccaccacgcccggctaattttttgtatttttttttagtagagacggggtttcatcgtgttagccaggatggtctcaatctcctgacctcgtgatccaccctcctcggcctcccaaagtgctgggattatggcagagaaatgtttgtttcaaaagtgtgttagtctctaaggaaatgaatacttccagactaaattctgtttatagtattatcattaataaataaactaaaacattacttctgtttcattgccccaatgtatattgtattaaaatgttcttttctgatcttctctaagttaaaaaaaaaaaaaagaaacaaagttgagtaaacaagctgagcaaactttgtgttgaaactttaatatgtccgaggaaaagaatcttgcattaagtccaatacagagagtctgataatttggtggagcagagagcctcatctgaggtggctttccgtgaacagcatctctgaggtgtcacctgctaccacattcactgtccaccctgggctttgcccctcaagcaccagggctcaggtctcttgttttgcctgtttctccctatagtctccctggcctgtgccttttagacaaaacagattaacatcacctttaagccgtcaatactgaacattctgtctttataaggcctgactcattaccaattttatttggtcaattttaccttccttgctttcaaaggaacaccatttgcctatgtcaagtgttctctttcttttatttttcccttccttctgtctttcccctccttccttccttccttcctccctccctcctctctcctctctttcttccttccttgcctccttccatccttccctccctctctctctttctttctttctttctctctctctctctttctttctttctctctctctgtctttctttctctctttctttctttccatcttcttttctttctatctttcttacttttgatgtagctgtcacgacctaatgaaaatactggcatgagtgatgccacctttagattctccaccttcctgttcctgtcctattcaccaacatgaattggtttgtggctgtaagtacttggtgggttattgctcatagattcagttgcatttttgctgagatagtgctgttaccaaaagcaggggtgctgcttgaagaagtaaacctaactctgaaaaatagagactctccagaaacatcataatcttaaggatggacatttgtggcctgttattgttacttcattctaggtgacagagtgaagtgagtgagggcaaaaatgactgcacacttatggaaagagggctgcctccaccacagacaggtagtgggaggtcccactcttccaggttgaacccaatatcctatcttctccttccgctcttggtacctgttgttgctattgtaaacacttccctcacctgggactgcatatagatgaaagattgctggggggtttcccaggatcttgggccagtgccaacaaatggcaaactttcaagtctagagatggtcctatggcatgactgggggacaccacttccttcaccagaacattcacatccttcccaaggtgccacgcccagttcttttgtccaacaataaactctgcgaagtggagtgaagtcaccacccaagccttagcctacctctgaccacagcctgtgactccacaaagataaatgaaaagaggaaagtcagtgatgttttctatactgtcagcagcaatctcacagcctcaatacattttctttcaaaagtttaatatgtaataactggcatttcttcttcattcctagttggttagactgcatcacatctgccatgccaaactattaagagtaatacaattcttactcttagtttattaagagtaaaaactattactcttaatagtttagcatgctattactcttttcttattttttaatttttttaattttttattttttgagacggagtctcgccctgttgcccaggctggagtggtgcagtggcacaatcttggctcactgcaacctctgcctcccaggttcaagcgattctcctgcctcagcctgccaagtaactgggattacaggtgcccaccaccatgcctggctaatttttttttttttttgtatttttagtgggcaaggggtttcaccatgttggtcaggttggtctcgaactcctgacctcaagcgacgcccccgcctcggcatcccaaagtgctgggattacaggcgtgaactgctgcacctggctgacgtgctattactcttacagcatctggacaatccctaacagtctgaaagctctataatgttgcaggtagtccaaaggccctatcccttattctagaacacaggctttatagcacaggctttggcaagtctgtaacagtctgaactcctccactgtattccacatactagggatcttttaagttgtcattatgtcctggcacaagcatttatcatatttctgggagcatgtagggttcaagatgcgagggcaagagagggctgagttgtttgttattaagctgacaggaaatggccaaggctcatgtgctactgcttgcagttgggcaaaagaggataaattaattgctttgtagaaattcctttctgcattctttagggaaaatttttccatgtgagctaaatgagtcaaagggggtggttttgggctcaacagctttgacattgtcccttcaaggaatgaaacaattaaagaaactgatctcctctgagaaaaagaccatttacaataacctatctactctacataaaatattcccagtagactcatcaaaacaagaccctctgataccacaccatactgggtttttccttattgggattcccccatgttttttctttaatgcttccccatgttttagaaacagatttgcttacccggaaccttccacactcaattccaaatttatcatagtactatcatttgggagtaaacaacatgtaaggggcctacacgggtggaaagcccattcaagaaactgaggatgatcaaatagtagagttgatagtatgtgtataatcccagggaggagtttcatgacggattagaaggtcaacactgcctgatgcagccgaaagatcacattaaaacaggacaggaaggaagtcctggctgtccagcaaaaggtctttagtggctatatcaagagaagcttttacagaagggtgagggtggtagcctgcgaacattggattaggagtgagagggactgaaggaagtagaaactcgagctcaggggaaggggagagaatgagcttgaggaaggccctctgatgaagggaaggctcttttctgatgccagtgagttgagcagacttataggaagcaaagaggagtctagggacagacagggattgtccaggtaatgtaggaaacatttgacaaggacagatctcgaataaaaacatgaatgcaatttctgtttcagatgtctcctttgcctgccccatcccacattctagaaaaatatttggtgcattaacagattttggacttcacagggcttcacttttattgtgcttaatatttgttccttggtgaaacacaaagagacaaactacacaaaaagagaatcatacttgatgaaaaaaatcaatgtttagaagttgctcttaaatcttttacccattgctaacatgggtatttggatgccatttggaacgtattccaggactacttatccatgaaaggattaatgatattggagccaggttcaaagtctcagcaacaagctaaaacctgctctttttagtagtcaggggcaaagcttagtatcctttcttctgaaagctttcgcatgctaagctttccattgccaagcccccgggaaggaaaataccagaagtttcactccgatagcagctttttctgagatgcgcctggtgataacattttccagtagggctatcttctgtctccttccttctctgtgtgtaccagtaaagccttgtacaagtctcttaacctttcttggcttcagtttccaaatttgtaaagtgaagataataatacctccctcatagagttgttgtgaggactacatgggctaacgatcagacagaaagcactcattaagtgtgactagcattgttaattgcagtaatagtagttctagtagcaggcttttccaggttataaggattaaagatacgctcatgttacctaagttaatggtgcattattttaagggtacaccaaaaagtaagaagaatgggaaactacttaaccagcacatggggtgcagaagcgagagcaattgtgttttctttttttttttttttttttgagatggagtcttgctctgttgcccaggatggagtgcagtggtgagatctcggctcactgcaacctctgccacctgggttcaagtgattctcctgcctcagcctcctgagtagctggggctacaggcatatgccaccatgcccggctaatttttgtacttttaacatagacgggggtctcaccatgttggtcaggttggtctcgaactcctgacctcatgattcactggcctcggcctcccaaagtgctgggattacaagcgtgagccaccgtgcccagccccaagggaattcttacagcctgacaggtttggaactctgagtctctctgtgtgtctgtgtctctgtcactccaccatatgtttagcagggttaattaatttgcccaagatcacacaattagtagatgattatgcaagatttgaaccagttgttattcattggaatatgattactgtgtaagttagcatgagaatattgaaaataaatgtcttgttagattcatttattttttaaaaaattcctatgtaggtcgggcacagtggctcacccctgtaatcccagcactttgggaggccgaggcgggcagatcacctgaggtcaggagttcaagagcagcctggccaacatggtgaaaccccatctctactaaaaatacaaaaaattagccgggcctggtgatgcatgcctgtagccccagctacttggtaggctgaggcaggagaattgcttgaacccgggaggtcgcagtgagccgagatcacaccactgcactccagcctgggcaacagagcaagactccatctcaaaaaaaaaaaaagtcctatgtatacttcttcacatcaatttaggcaggctttatttgttaacttttgttggtagccaacatgcatttaaactacttattattgtcctaatctaagaaaaactgagaaatggatgaagttggtcctagggtatcccaaagcacagagtgttttattctgtccttgggacagaggtttgattcaaaatgttttttcggaaactagccttgaacacctaattttattaatattctttttacactccatccctcctggaaaaggactggaccccaattcccaccattgcttttttgggacccattatcttccttagcttcctatgcatctacagggtagtctgggcttcacttcctcagtgtccctgtatgaaattaggtggatatagattagtctgatgtaggaatatcacactgtactaaggtttagtttgtatgttattctctcaagtaactgatctttcaatcgaactaaacacttcctatgtgctttaaggtggtgggaattacaagcatagcaagttatgattggtcacggatttctttcctctttaaatggtgacctactgcccattgtacctactcaaagcaactttctttaggaaaaaagaccacagtctactttcctaagcataaactcagttctcattccacctctaccacctgcaagatttgttaggcttaagcagtcccttaacttctttgagtgtttgttgccttgcctacttcattggaagtaaggctctggaacagggaaggtttgcctccataagactaaaagttatgctaatataagagactagcaaaatgggagacatattcagctctcttcttgtggggaataccttgcccttgaccaaaagccttgtcccagaaagagccgtgtgggtgttggctttgtgcccaacatgtggctcctctgccatgattgatggcttcatttaagaaacaggttttaggattttttcccctaaaatcttattcctgttaattatcatggatcaactttaccttagctcgtttaatacacagtcacctggtataaaagcatgtgaaaacccccagggatcgtaaccacatttatgcattgagaaaagagagtgaggccaagattttgagatgtgttcaaatgcaagaagcttttaaaatgcaaagtattctaaaactgttgaaagttgaagctaactgttgttcccttgttgaaggtaaaaagtaaagcatttttaggaaagcacttttccttatgtgtctaatatttgggaactgcataggagaacagtttaataggaaccctgatattgacagtaagatatattcttaatgtagtaaccagacccagggcagaatttgcaaacccatggtaggcatacaggtggctgaagaagaatcgggacagcaagatctcactgagatgcaattccattcctccatttgatacagattaagatttctgaaaaagaccatcctcctaaaccctcatggactctgcagataatatgaggccagaaaatgaataattcccaactcttgctatctcgttactggccagtgtgtctggcttcgctgagtgtgtgccttctgaagcgtaccctataattattcagcaggtatagtccagttcgtcctacttactttagcaagattacctttcttttatttttcctgtgaaaatccttctcttccttctttcctcctttgtctttcctctttgttaactttttaaatctaaagtgccttgaaaaacttgtttacatagtagtaagaaggaaaatgttgacttgtgctatcctgggaaccttgaccttcctgcattatggataaatcatttccctgcaggtggaagtggaaaattgcagatagaaccacattgactcacattctccttctacttccatttgagtgagcaccaagtatgcatcacgacttgagattataaagttggcttaatgatgagacaggtttctcagtcgggttttccattggctcgaagttcacaaggcagttgttgcttgtctcagagtgtccttaggtggactacatctgaacccttggcgttattataatgcagattctagctgtgctcaaaccaatgaatcagaatctcaggagggtggcgctcagaaatctgcatggttgatcagttctttagcagattcttatttttgtatgctaaagtttgagggtcaccactggagagattccagaacagggcctgcaagggaattgttcaaagtttgctcaagttaactttgttgttacagcattagcttgaatatcaggaggttttgtatttaagttctctaaaaaaagaaaaagaaaaaaagagaacagtctcaatatataaaaggaaaggttttcatatatgtgcccaattataagtatcttgagtattctaggagtctaaacagaatgtctttagatcatccttataacgatcctgagactcttttgactgttttgagttgaagacaggtaataagaaagaaatcaccaattaatgcagaaggaaataaatttctgtatataataatattcacatttgccatgtctcttttaaaaagtccaaataacaggcagagcgcggtggctcatgcctgtaatcccagcactttgggaggccaaggcgggcagatcacctgaggtcaggagtttgagatcagcctggccaacatggtgaaaccccatctctactaaaaatacaaaaattagccaggcgtggtggcacttgcctgttgtcccagctactcgagaggctaaggcagtattatcacttgaacccaggaggtggaggttgcagtgagccgagatcgcgccactgcactccagcctgggggatagagcaagactccatctccaaaaaaaaaaaaaaaaaaaaaaaaacagctcaaataactttaccgtacataactttaccatacatgtcctctagtctcttatcatttcttcatatgaagaataatttatactcattgatgtaaattttgctatattttatacaacaaacatagtattattttaatattgcacatagagaaaaatacctcttcccctcaaaattagaagggttggtatttttattcaggcttattgatttaaaatacctgcttgatccgtaattcaggccatacgatttcaccaaaacaaatatcctaatagttgtcatcttgaataactgtttagtgcacagaatgtagtctcatttattaagaagtgatttaagagattattacttctgcatctatcacactaacatgaccaactctttagtaagggaagagtaagggaacttattttatatctagatagaaattttattaaggatacagtattaggattcataggggaaatagtggatagatcacaagaacgaggctctttctgagccctgcaggaaagaatatttgcagaacaataaaggacatggtggcttcctggagaatgttggccgaagactgagccttacttctggaaaaggctcagtgctagagccaagtgagcatcgatatgccaatacaggcaagaaaatcctgcaagaggcagacttggttcttaggtcggaacaggctctgcttcagaacttgatccggtacccaattcgtttctgcttcagcttctttttctataaaatgagggtagtacttatcccatgagggagctgttatgaggataaatttggctttattgaatgtgcatgattcctggaacccataaagatgtcaaatttagaagcctcagagagatttcctttgctctgtgaataactaaatttggttagctggggtggggtctgggtacttttccttgtgaagaatttttccctcattctggtcatctcctcccctcctatagaggcaccatatatttttcttgtctcaggtacctatagtgataaaacaccctgagctgaaaggatcgctggatagggcagtctcaatacaaaagaatgtggcagaagctcaggcttcagtgcacatcagaatagaagcttcatgagggcagaggcttttgtctgctttcctcattgcagtatccccagaactttgagcaagtgcacactcgatgaatacttgaaagaataaatcaatgtcagacatctgggcttatgtctcatctttctactgttctcaactaagagattctcgtcattctacaactttcctgagcctgctctccttctccaaatattcacccttccaggcactgactccacctcccacatcagagctttttcttaaagtaaataacagtcaacaattaatagcttcataactttggaacagtgcagtgtctttggtttaagaagcattgtttccatcctccaaactaaaataaattttgagaaaagatggagatggtttgggactggggaagaagggaatggaagaagtgattatttgagggcacattaactatttgtacaaagtagaatatcttagttaaatttggctacatagcaagcaggtatcattaaatggatgtctgttagaatcttgattttcaaattaactagatagtcagcgttagttagactgagggagggtgattacagtcctatgtcactgagggagaatggtgaaagggcaagagaaggctggcaggtagagctggaatttttctgccagcaatagaccagtggttcccaaatgtaagcctgcaacagaatcatctggagggcttgttttttgtttgttgttgttgtttgtttgtttttggttttgtttttttgagacagagtctcactctgtcgacaggctggagtgcagtggcgcgatctcggctcactgcaccctcagccttccaggttcaagcgattctcctgcctcagcctcctgagtagctgggattacaggcatgtgccaccagcccagctaatttttgtatttttcgtagagacggggtttcaccatgttggccaggatggtcttgatcccttgacctcatgatctgcccacctcggcctcctaaagttctgggattacaggcgtgagccaccgcgcccagccaggagggcttgtgaaaacacagatagctgggcccatccctagagtttaggattcagtaggtctggcggaggcctgatagtctgcatttctagcttggccaggggatgttgatgttgctggtcccaggaccacattttgagaaccactgcaatagagagtgtgcatgaaaatacaacaacaattacctgatggtccttagcttagttcagttgtcccccacaggttgaagcagtgttcaagggcaaacaaaaactttctctctcagccacctccataagttccatagtttatttaacaaagcaaactcacaaagaaggaggaagttaggactgctccatttccccttatagcaaaggcatgtgtatttcacaactgcaatcagcttgaatagcagaggctggaaggctctccatgtctttactgaagtcacgtcactaagtcacacagacatgctgctaattcactgccttggccagcacatctgaaaataaatagcaccattataggccctttcatgaatatacagcatgtggcctctaaattggccaaggagctggctatgctgggacaaataacttagataaatcacaaatcagagtggagaaatgaggtgtttttaatcaacagcatccaacaatgtgtgttgagtttaactgaatccaggtagaggagggagtgggtgcaagagctcaaagtatgctgagaatagttttatttcaaaattccaggagacttagaaacaacatggtaatgatgaaaggagcctgaagagactctttttttttttttttttttttttgagatggagtcttgctctgttgcccaggctggggtacagtgtcacgatctcggcatactgcaacctctgcctcccgggttcaagcaattctcctgcctcagcctcccgagtatctgggattacagacatgtgccaccatgcccggataatttttgtatttttagtagagatggggtttcaccacgttggccaggctggtctcgaactcctgacctcaggtgatctgcccgccttggcctcccaaagtgttgggattacgggcgtgagccaccatatctggccctgaagagactcttaagatactttcataatagtttaaaaagctgtatgtgtgtttacaatttctgtcataaatctatggtaaccacagcacaaacattttagaaaaagaaaaaaaaaaacaactctcggttgagtgtggtggttcatgcctataatcccagcaatttgggaggctgaggcaggaggatcacctgcatccaggaatttgagaccagcttgggcaacatagcatgacccatctcgacataaaattaaaaattaggtatggtggtacatgcctgtagtcctggctactctcaggggactgaggtaggaggatctcgtaagtcctggagtttgaggctgcagtgagctgtgatctcgccactgcactcagcctgggtgacagagcaagaccctgtctcaaaaaagaaaaaaaattctattttcccacctctctaacataactgtgaatagtagtatttccttctagtttttaagtacactatttaaaaacatggaaggttttcaaataatgtacttagatttaaatgcatttttaagcttatacccatataataagcatagtaactaacagaatgttctttggagtcagatagtcttgggttcaaatcctccagacatttccagccctgagttttgcatttgttaaatagggatgataaacctggttcatagcattgctgtgtggattcactgaggtgctcatcaagtgctcagcacagagccctgtgtcatgtaagcactcagtaaatagtggcatcattttctgttttcacacacaaaaaatgagtcgaccttctgcaatcctaataatcagtaagttcttcttaatggccagaagtatacctatttttagtctatgcatttggcaaaatttcattccacaaattgtttggtggtcccaggagctgctttcaagatcttctctgaccagcttgtcgagagcttttgttatctgtgttttcctcaaagattagactcatgaaagatgtgtgaaagccaaaacaaaggaatgaccactggtgctcagagtgagagagattggtttagttgtttagccaggctatgtggctttgttcccagaccacagattataaccacaccattgtgggcaccacatatagccattttggtaaactagatatgggttgctagggacatgggcaagaaaccatgggtggggaggtgtggacctctcagccctgccctctcaagcctggccaacttcacatctgcaactgggactttgtttctgttccagacctgtttatccaactgccaacttgacagccacttggagtcctcatgagaacctcaaacttagtatgcccaaatgaaattttcagctcaccagaaggtaaccatactgtcttgagtcttacagttaccctgtaaacaaagggattaactttactagatagcaacttcctgcccataaagttaagaaaagagcccctcaatgcaaatgttggttttgcttatcaaataaatggattcttggttcttcaggatagttacagataacaatgggcagaatagccagtaaattcagtaactccttaaaattgttgaaagtattttgtgcactttctttatatcgctgcttagagtgttaattggtaaaatactctgaaggactaatacacaaacactttcacccagcaattccaattctaggactttattccacagatatatttatacatgtatgagttcacatgtacagttttctgaatttttttgtgctggcagaaaactagaaacaacagaaatgaatgaaagagactagttaagaaattattgcccagttttatagtagaatacatatgcagctgtaaaaaaagaatgagggaattattatgtatttatctattaagtgaataaagcaaaatgaagatcaccagcaaacagataaagaaattgtggtattcatacagtggaatactcctccataataaaaaggaatgaacaatgggtgaacactacaacatagacgactctcaagtactgtattcccatttgtgtaaataaaaatgtgggaaagaatgtatacatgtatttgcttataaactctatatgcacagaaggaaacacaagaaattattaccccgggaggcagagcttgtagtgagcggagatcgtgccactgcactccagcctgggcgacagagcaagactccgtctcaaaaaaaaaaaaaaaaagaaattattacctagattgtctatgcagagggaactgggtacctggcagacaggagtaggagggagacattgtacaatatgcttttttatactttttatatttaaaattgcaaaatatcttacatgctcaaaataaaaatagaatagcttatataactatgtctaaatattacatgtagttttcttctctggctattttctttttggtttttatataattttttaaaatccacttacttagcccaggcacataaatggaaagaaagatatgcttaaaattatgttatttgcaaaaacaaatatttagatgttttagagctagtatgtttttgttggtttctagtttagttctacatggcatcagactagctactctatatgatttctggacctttgcaatttgttaagatttgttttatggtcggggatatggtcaatatgtaaatgtttaatgtgtgcaagaagaatgtgtactctgaagttaggcatagtgttttctgtatatgtcaattagcacaagtctgtttatcatgttcaagctctgtgtatctctgggtttttttaatctgcatgatagaacagaagtatgtttgaaacttttattgtagttgtggatgtaatatttttcctctacttttgcagttcttgctttatatattttgagcctatattacttggtacatacatatttagaattgttgtgtcttcctggtggattgccctttgattatttaggaaatgtctctctcttcggtaatgcttcttaaagtccattttgtctgatagtactatagctacctcagctttcttttggctaggtttcataactttttaaattctttcactgtcagtctttttatgtccttatatttaaaatgtgtcaaaagaaagaaggagaaagaaagaaagaaagaaagaaagaaagaaagaaagacaccgcgatttacctatgttacaaacatgtatatgtaaccctaaacctaaaataaaagttaaatataaataaataaagtgtctcttcatgaaaactttcttagcatcattagtcattagggaaatgcaaattaaaaacacaatgagataccaccacatacaacatgtctagtataatggctaaaatgaaaaatactaacaacaccaagtattgttgaacatatggaaaaactggaacactgattatgggagtatacaaccatgttgtaaaacactttaactggtcatttacccaagaggaatgaaagaatgtatccatataaagatttgaacacaaatgtttacagcaactttatttgtaataggtaaaaactgaaaacaactcaaatgtccatagacagatgaatggatttaaaaaaaaccatgttatatccatacaaaggaatactcctctataataaaagggagtaaactactaatacacagtgcaatatagatggattgcaaaatgattctgttgaatggaagaagccagaccaaaaaaagagatatattgtatgattctatttatgtaaaattctcgaaaatgcaaaggatctacagtgacagaaagcaaattagtagttaccaggagacggagggtaaaaattaagaaggggcatgaagaaacttttttattgtagtaatggtctcatgggtctatacgtatgtcaaagcttatctaattgtatactttaaatatgtgcagttcattgccagctaattatactcaatctgtttttaaaagtaaaatgtgcttcttataagtaacaattttttaaaatgtagtctgatgacctttgtcttttaattagagaatttaatctgtttacatttaataactgatataggcagggcacggtggctcccgcctgtaatcccagcactttgggaggccgaggcgggtggatcacctgaggtcaggagttgaagaccagcctagccaacgtggtgaaaccccgtctttactaagaatacaaaaatgagccgggcgtggtggcaggtgcctgtagtctcagctactcaggaggctgaggctggagaatcgcttaaactggggaggcagaggttgcagtgagctgggattgcaccactgcacttcaacctgggtgacagagggagattccatctcaaaaggaaaaaaaaaaaacctgatatatttgggtataaatgttcaatcctactgtaggtttttttttccattttgcccacttgtttcttgttgctatagtcattacaacaatacatgtttgacttattagaatcctagtattaattagtacttttaccatttcccagatgatataatatgggctttaaaacacatgaaatccgtttacccctcaaaccttttgtgtatcattgatgttttaattctatgtatattttaaacttcacattattatcattattatatttatattgcacagtcactatcatttagatttacttatgtttacccttttggtgtatttcaatgctttcagcacttctgtgtttccctttgggattgcttttcttctgcctcaaaaactctccttactatttattttagtatggctctgctggtgataaattctctccatttttgtttatctggtaaaatatttttccttcattacttatgaagaatattttcactaggtagaaaattctagattgttagttattttatttcagcactttgaagatgtcattgcattggtttgtggatttcactttttcaattgagaagttaattttgttggttgcattattacactttgaagataatgtgtcttttccctggatgttttaaagatttttctctttgactttcagtagttctactatgatgtgtctaggtttgatttcctctgtattgattctgatgggcatttatagaactttatgaagctgcgtctggtatttttgccagccagtatttctttaaatattacttctgctccagtttcatctctcctcctcctttgggatccagcttacacaggttacatctgttactttatgactcaacacacttttctggaaagactctcttttctttaaacacaagacactaaatggttacaggtgttcttttaggtgattatgctgcttcatcagcagatggtgattatatcaagaaggaaacttatatgatgacatataaaagctggggagaggagatgtctctgaagacagtgagaaatccttctctagtcttgctgctggaaccctcaaacacttaagtcatctaataaacattctactgtcttcagaggaattttctcagtgaaagggatttgggacacccctgtgaggaagaaacataagttccatgccttccaaataaggggcaaacttttctttgtagtcatgtttccacctgttgaatccgttttatggaagttgtacagttatggcttgtctgtttatgagaagagatagagaatatgagaaacgataaaacctgaaataatccattgtgaggccacaggctgaagaacttacaaggaatttattctagactttatggctgaaaatatgtatgcatatatgtatatgagtgtatggagatacagttatggatagagatctatagatatatgtgtagatatatagatacataaagtttgctacagaaattcattttgtacacttttaaaagtgcactttactaaaagcatccaagaatgcatctcagaaaaagccttagatttcttttatgtggtcaactccaggaactactcactcttgagatagatgtgtgttttcagagcttatccatgccatgcacaatgatctaaccctttgatagctgcatcattcaaagtcagtttttctacatgcaacaaatttttaaaccttgatttttatttatttatttattttgagacaaagtctcgctcttgtcccccaggctggagtgcaatggcgtgatctcagctcactgcaacctccacctcccaggttcaagcgattctcctgcctcaacctcccgagtagctgggattacatgcacctgccaccaagccaggctaatttttgtatttttagtagagacggggtctcaccatgttggccaggctggtcttgaactcctgaccgcaggtgatccacccgccttggcctcccaaagtgctgggattacaggcttgagccaccgtgcccggcctaaaccttgatttttaaaaaaatactaccctgccctaaccttgtaacttaggaagtttggggagaggggtgtgtaacaacctttcactgcttatttgatgtaaatcatttctagtcctgaaacaatggctattttgcaaggtttaattatactgtgtgttgtggttgcatgcataggtacacccacaaatgtctgtcattaatacgtatcactagctttgtactttacactgtatttttggagtgttttacagtcgttcgttaccaagagtaaattatatatttgcttttctttaccccacccctttcactattgtttaaaacatgtcagattcaggaaaacctcaagagacccaaacctctttcaatacttatagacaaagtttttttttccttaaatcagttttaaaatccatccagccattttggctgccggccataccagcagataatgaaagaattttccttgagggtcaaaagccagggagaagccttccagggctgtttggtttcctagcacagctgctggagtagctcgtggtgctgattgatctgcttggagattcttgtgcatcttcacctgttagagctggaaagatgctcaggactatacagcccagcccttctggtttacatataatgaaactaaggcccaccttagtcaactaatgtgcttaaactcaagcaaatggcaaatggcaaaactcaggactctgtcaatgagttttcattctttttctttattcttctagacacatattttataaagaaatgaggcagcatgatgtttaaaatacttaaagtgagaatgagaaaaactgatgtctacatatcatgaaatggttaaaaagtttaacgtgcattgtcttctccattagaacttcttttacgaatttttttctcaaaatctggctcagaaatcttgttttaaaagctccctaaacattcctaggcagaattagtaacgccttcctctttgctaacaaggaactgtgcatattcctgtaatagaatacttaccatattatattgtaagtattaaattattcatctgccctcctcccacctacccactggatcaggcttcccaggaacagcaacagagagcccagcaatttgtgtgttctcagtgtggaatgaatgaatgaatgaatgaatgaatgaaccaaccattccttcacagtcttgcactatcagtgaatcttatgctttattgaacataaaaatcacctggaattgctgacttaaaatacagttttccaggctataccacaagagatgctaatacaggactggggtaggtccaggaattcgaatttttatctaagtagctgatgacttaatgcaaatgatccagcagccacactttgcaagctctacgctatgattagttgtggtttgtagtcccaattgtatatcataattatctgctgatctgaaaaaaacatagagcttctctacccactccttaccaccagtccatcaccaccattctgactccttagtcacaatgggtattgacattttaaataaatcccaaggctcccttccgggagaataaagaggataatatttataaactattttgagttccttagaagaagggtatcttagctcattaaggaaatattatcatgatataaatctaacatcatgaaacttatcttggacatgtcaaatttggtctaagaatcaaatgtagaggaaaataaaacccacacacagtacctgcatggaaacggaacctgtgcaaacacctgctttggctatgttcctttttgtggagacagatgtcccccttcactaggaccagggtagagatgaagaaggttgatttggacattggggtgctatatgttcttttgggactgaagttccatattaggaaacttaatagctgacatttacataacttttaaacatcccaagtagtacgctctgtctgcacactattttatatgtatgcaatttgtttgtttttgtttttgttttgagacagggtctcactttgtcacccaagctggagtgcagcaggcatgaacacagttcactgtagcctcaacctcccaggctcaagcaatcctcccacctcagccccctgagtagctgggactacaggcacacaccaccatacctggctaatttttgtattttttgtagagactgggtttcaccatgttgcccaggctggtctcaaactcccgagctcaagtgatccacctgctttggcctcccaaagtgctgggattacaggcatgagccactgtgcccagccatatggatttttttaaaattatgaacttacataacttcacaggagacagacctgaatgaggtagttattaaactactttctgactatggaaaggatttctgatccttgtagtatatttccacgtatattgttatactgttgtgtgtttgtatttagttgctcatactattttttactgtagcttactttatatgcaggtttccatgggtcaacctaatttatatttttgtcattttaaatggaaaaatgatatcccatatattttgtagtattatttgttcagtgttctttccaatgtgggatgctttggttatttctaattatttgctatcatgctatcatatacagaattcttatgttcatttctgctcaaaattatatttttgtttgtatgaattccacggtgtatatttcccaaagcgagatagttagataaaagagtaacagcagtttcatagttctggttgcatattacagtattactttccagacacacagagccaatatacaaccccaccaggggtgtgaggcatgctggttttcccacagcttgaccaacatgaaattttatcattccagcctatttctgctagcttaatatgtgtgtagggcctcactagagatattttattttgaagttcttcaaatgatatgaagcaattcttttccacgtggaatgattcactattttcattttaaggacaaaccattcgtttgtatttgacagttttgaagtgacaggtttaattgccttctgtataattgattctgtagggagagaaaataggagtgctattaggtattgggttaggctcaaagagtcaagaaagaagattagttgtgtagttctgaatttggaaacttgtatgtggacgactggaacagaaataccagttgaccctgtttaagaagggctagagagcaggaacattctgatttcatgatgacaaaaatactagagttttgacataggacaacagatcttgcttcaaaatgaaagcaagaccctatccttcctgcctctttgatcctctcacagtgccactttctttcctgaacattttcagatattcttatttcagatagaccactctggtgtataataggaccagttttagagtggccatgaagctaagacatgttatttgagagctcttaggggaagacctggacacagcagtcgcaggagaagtcagtcttatctgtaaaaaggtcagcttgatcacagaaaaaggctttggcttggttgtgttggccctccatggcttatgatcctctttcaagtaagcaaataaatgattgcagtgttggtttgagtcctgtggtgccaaacacaagacacattgttgctcatgcaatatagacctttgttttggacagtggtctaatctgctggtttttaaaacattggtgactgtccaacttataattaaaatcagtctatcaagcacttggagacaaaatctgaggttattctttcattcctagttgtcacactaattttttgccttcacttttgtctctgtagaatatttacacgtacacctatctatatctatttagatataatttatatactacaaaattcacccatgtgtacagttcagtgatttttaatgtattcacagtcatcactacaatcaatttcagaacattttcattactccaaacagaaaccccaaactcattagcagccactctccatttctctacaatatccccaaccttaggtgaccacaaatctactttctgtctgtatagattttgcaattctgggcatttcatataaagaatcatagaacatgtggtcttttggtttagcttatttcacttaggataatgtttccaaggttcatttatgttgtggtgtatataggtactcttttcctttttattgctgagtaattttccattgtgtggatatacaactttttgttaagtcattcatcagttgatggacgtttggattttttccattttttggcctttatgaataaggctgctacgaacattcatgtgtaagtttttgtggggaagtgtggttgtctttttttttttttttttttttgcaacagagtcttgctccgtcacccaggctggagtgcagtggagcaatctcagctcactgtgacctccgcctctcgggttcaagcaattgtcatgcctcagcctcccaagtagctgggattacaggcacacgccaccacacctggctaatttttttgtatttttagtagagatggggtttcaccatgttggccaggctggtcatgaactcctgacctcaagtgatctgcccacttcagccccccaaaatgctgggattacaggtgtgagccaccacacactgccagaagtatgttttcatttctcctgggtaaatacctttgagtggaattgctgggatacatgggagctctgcttaaatttttcaggaactgccagatggctttccaaaatggctgcaccattttatactcctaccaacagcatatgcgtgctccagtttctccacatccttgcaaacacttgttattgcccctctttcttgttatagccagcctagtggttgtgaaatggcaactcattgtgatttgatctgcatttcccatttccctcacggctagtagaatacttacttcctatcctagtttttccttatacttttaaaaaattaaataaagaaaacgctgtagaaaattaaggagcaaaatgtatgcttgcagctacagcttcctctggggtttcacacttccttgcctcatcatgtaacgggccaccactaggatgaaggtgctccagtcttattcttccaatcttctctccatttgtcattcagaatcctgggaaagagagacacttgtcctgccgtgagttatgtgcccactcttttgatttgtgtttctgcctagacagtgcacagcatgagtgttggcatcttgaaaggaaactggggtgctcctgagggagaatagatgccaaagttgggacaagagcccagtttcctgcctttctaggtgtaactcattgccaaggtcgggagcaaagcaaaccatgtaggaaacctcatcatgctgggtagttaataagtatgccctagcacacgttttcacagagaaaacataatacgcttcatttgtaatatttaagtattacatctaaagttacaatgtttaaaaatttatatatacccttgttggatacaaagcatgtttaaaatatgtgacctcatttgatcctcagtaatctctgttagtttctaattatattcagtagtggtattggtattgtatgttttggcctcattgtggtttaaatacacttttgtgaactagcctgagaatccaaccaccaacacaatgatgtaatgagaaaacgtgctctgagttccaaacaaatggctaacagataagtgctcagaagtcaacctttttgtaagctggggtatcactggccagcagtcacatgccagcaggtgtgagtagacagtggggaacaatttcctctcatgtgtatggctccctaaagtgttggctgagcattgtccacatgggtgatgcaaaggatcactgaactaggagcagttgggaaaaaatacaatcattgggaattcctgtagcatcgaaggtgcctacagggaggtagaagtattcatacaacagttctctggtgttctctgttgtagcaaccagtcagccaaaagggttcagctgcttgaaatgagaatggctggatcaaaatggcagctcaggatttaaaggattctagtcagataccagacatcctcacatagagaaaactctgaatggctgggggagaaggagtcaaatgccctggatctttttcttgggcctcaaagtcctccttctgtcatcatccttccagtattgggcaggacctgactgcaggcatcatggcctctgtgaacttctcaagggtatgtattatctgacaaaaactacgatgtccactaacaggccactgaaaaggtatcttagtcagttctgctcattgcccagccaaggcctacgttttataacatgatatcaaagattgcatctaaaattgtgatgatttcctaaaataatcatttcatttagatttttctattttaatccaaggtattcttcagcggaaataaggaaacagtttactctcccaccaaaccttggccagtaccatcgacagagcataagtacctctggcttcccctctcttcaactagtaagtatgagttccaggtttacttagcgattggtcaagtgcaaaagtgcccagggtatgtgtttgcctcctgttccttagatcttcctaccatcacctcacattctccagtcaccagatcctaactctgtgactgtgtctggacatcagacaatatccctctctctctctgccaaccggtacttagggtacataatagaacctctgggagctgtggttttgatgtctctagactaggtgggcttccaggtgactcagtctcatccaaattatggttcatatttgggggagaagggctagcccaaaaacttaccaccatttgtagtatgcatttttttggaaaagcatattccaaaatctgaaatgccaagttacagacctcctttttgtaaaataattttcttgctagtataatttacatataataaaattcacacattttaggtgtacaatttggtgaacttgggcaacttagagtcacttaacctttcctcagtcaagatatagaacacttcttttatcctaaagcgttccccagcgcgcttttacaatctcctctccccaggccacaccctccaactcacgcaatctctgactcacttctgtcaccataattttgctctatctggagcttcatatcctgttacagtatgtacaaaccttctttttttgagacagggtgtcagtctgtcacccagcctggagtacagaggtgtgatctcagctcactgcaacctcaacctcccaggatcagatgattctcctcccacctcatcctcccaagtagccgggactacaggcgcatgccaccacacctggctaatttttgtactttttgtagagacaggggtctcgctatgttgcccaggctggtcttgaactcctgggctcaagcgatcctcctgcctcagcctcccaaagtgctgggattacagtgagccactgcacctggccctaaaccttcatttttaaaacacatttcctcttaaattgaagattgcctacatttttatatcaatgccaattgttgagtgtgcctatatgtgttatattatttgagcactaaatgccagatgtgtgccaagtgagataaatctgacaaatgagatggtttgtaaaaccagcagtgaatattcacttcctctgtgagagagctccagccctcctgtactcacttcctcacacagcacagcagcactcttgctggttctgctgcttatcttgaagaggttaggttactttttgtttctacttattacttcgaaaccacttctgccttagaaattttgtaaccttccgctcagtttccggtaaccgccattttgtctcctgtaacaatttacgcgccgtgtaactgtgaatctttcaaaggtatgttttactggagtgatttctggttatttcagaaggataatttgtgtgttgcgtcattaatgaaatagtagtacgaaaaacctatagcatcttttactgcaggaggtaactttccatgccattttttcagaaaatctacttatgacttcagtggcttgctagactggcctttttatttgtacttttcctgtgtttcagaattgcagagtataataaaggcatgtcaagtgcatattgtgtccattttcaggtatattagataagctttacaccaagataaattagatatgcttattggtttaatttgtgctaatatatatttaattgaaaaatcaaaaaaatttttttaaattgactgaagttgtattccaaaacatgcaaaatttagtttaaaatagattggatacacttttaaattttaaacaaggtagagggtttagtgctttgcttttttaaaaagtaaatgaaggctgcagctttctgcagtagttgtcttgggaagtagtgtggacatcactcctaagagacgttaaggaagtttagctaacaggctttaaccctttctctccataccagcttttactcttttttttttttttttgagatggagtttagctcttgtcacgcaggctggagtgcaatggcaccatctcggctcatcgcaacctctgcctcctagttcaagcaattctcctgtagttcaagcaattctcctgcctcagcctcccgagtagctgggattacaggcatgcaccatcacatctggctaattttgtattttgagtagagacggggtttctccatgttggtagggctggtctctaactcctgacctcaggtgatccgcccgcctaggcctcccaaagtgctgggattacgagcatgagccaccatgcccggccaccagcttttactttaatgccacagccttaaattttctttcaggagaaattattttatgtaaagttacaaaggaaaataatgcttaatatctgtaagcattcgtttggtaagtttgctgcctcctcagtaagttttgatgaaagtgaattttgatgaattactaccttagccgggtagtgacgttaacatgtggcttagctgtccattttctaagatatcaagaaaccagcaacaataagtaaaattgttaaattatgcaagaatcacatgttcctacctgtcatcatttagtcttggttctatttgcatgtgaatatcctttagaatatattactcccagttattccgctttacttttctgaatctcttttcccatctcttgacttcaacttcagtatatggctcttgttccttctacctggagaacggaggcatgtggaagcccagaggattgaattcttttttttttcttttctttcttttctttttttttttttagatgaatagtctgcttaggaaatccatctccataatgtttacctggtatcgtgttgtaatgtcagaatgaagtggctgttcttccccttgagtcatcgtcccgaatgaaggttccccaaaagaaatcatcaacttatgtggtgatttccttttacctttaaaaaaaaatttcttttcatggaaagataatggaacatgtcggtaagattcatttctaggaaggcaaaggagtagtttatcatctaaagactctcaacctaaagctgttttagaaaactttccttaaaatgagaagccgtaggttttcgttgcattattttggctaattgaaaaataagaccaagtgcgttctgaccttcgtttctcttacctttatttttacaaccaccatttcaatggcccacttgctgatacaaatgattgtttaattttaaaaagcatttaattgaagtcaagttatttagaacctaatcatttacacgtctttgttgttgctgctgttttgcaagagtgaagagcttggagtcaggtgaatctgggatgaggtacagttgtcatttattagtcatgtaatttgtgacaagccacttaatctctctgaagacttcagtttcttcatttgtaaaattggcataataatgctgtccctagtagggaatatagaattatataatgggtcctttgtatatattggctagtattgctctcttacgatttggcactatggagacactgtgggagattaaaagaagatgatgaataaaaggtgacttcagctctgaagggctttatgatccatttgggagaacaggtaatgtagaatatactggcttcaaaagtggcaggtgtttagaagagaaaaggatacatgatgtgataggaggcaaaggcttgattgagaaggctgagaagacttagagtaagggttctcagccctgactggacattaaaattatctagggacaattcaatcagaattcctgggggtggggaccaagcatcagtattttaaagttccctggggactttaacttgaagcccaggttgagaatcatttaaacagctctgttatttatttatttaaaattttaatgtattttttgagatggagtctcgctctgtcacccaggctggagtgcagtggcgcaatcttggctcactgcaactcctgcctcccaggtccaagctattctcctgcctcagcctccccagtagctaggaatacaggcgtgcaccaccacaactggctaatttttgtacttttagtagagacagggtttcaccatgttggccaggctggtcacaaactcctgacctcaagtgatccacccacctcggcctcccaaagtgctgggattacaggcatgagccactgggcccggcctagttttactttttttttttgtaatggaatttccctctgtcacccaggctggagtgcagtgatgtgatttctgctctctgcaacctctgcctcctgcgttcaagtgattctcctgacttagcatcctgagtagctgggattacaggcagctgccgccatgtctggctaatttttgtatttttagtaaagacggggtttcgccatgttggccaggctggtcttgaacttctgacctcaggtgatccgcccgcctcggcctcccaaagtgctgggattacaggcttgagccactgcgctcggcccatttaaaaaaactttaaaggtagacgtattccaaatggggggaatatataaagaaaggtaacacttattttgccctgtgtgctttgaatttcagaaggtgtagtaagcaaagaccacttactaaccctacagatatatccttagaaaatacagtggtttctgtcataaatctgataaatcagatgagaggaagggtgtatgtttgatgttgatttttctttttgttttattggggtttttaaaaactataaatatcaggtctgatgactatgtgtataaacattttctaagtagataaaatattttcaaattttgcattttttagtatgaaggggatccatcatttgaagttggttttctagatgtgatgataaacttgtcccaggtctatttgacactcctaccaaaatcctttgtgaccagggctagaaggcagctgtggctagtaaataaccctgtgtgtagactcacttattggctttggcattctctattgccacagctgtgtgaatagattaaccagagaccctctggtgccagccacctattcaggcaaacaagtctataatcagtacctctgttaaaatgaaactgtaatatactattgtcttttcatttatttatttatttatttagagacagggccttgctctgtcgcccaggctggagtgcagtggtacaatcttggctcactacaacctccgcctcccaggctcaagcgattctcctgcctcagcctcccaagtaactgggaccacaggcgcaccattgcgcctggctaatttttgtattttttttgtagagacggagtttctccatgttgtccaggctggtcttgaactcctgagcttcagtgatctgcctgccttggcctcccaaagtgctgggattacaggtatgagtcattacacccggcctattttctgattgttcaaagtagaagccaggcacaatggctcatggctgtatgtaatcccaacaatttgggaggcagaggcaggaggatagcttgaagccaagagttcgaggccagcctaggcaacatagtgagaactcatctctacaacaaagttaaaaagaaaaattagccaggcatggtggcacatgcctttagtcccagctacttgcgaggctgaggcagaaggatcacttgaactcaggagttggaggctgcagtgagccatgattgagccacagtactctagcctgggcaacagagtgagaccctgtctcagaaaagaaaagagaagagaggagaagagaaagagagaagagaagagaagagaagagaagagaagacatacaaaagaagagtaacatacaagagaagagttaggagaccctgtctcagaggaaaggaggggaggggaggcgagaggacaagagaagaaagagttaggatctatgccctaaggaagtaaggaggatttgagactgtgtaggtggttaataaccttaagctacatattttatggagggaaaaatcctatttttaaaagtgagaatagaacaattttgaagtgaaatggaatgaattagctggaccataacggctctgactgaagaaaaggatgtaaaaagccacatcctggatatgtaccaaacaccatggttacatggcatgtttgtatatgtaacatttatttaaaaaaaaagtctcatagcttagaaggcatttatttttgttatgtgtataggcttctgtgcaataaagcagccttttttattttacagctcatgatgacttaaatggttaattgcctgataaatatggtcctcttttattcttctgattctgttgttcttttgcacttcatctttcaaggggttgggctattcttaggtttcactgattgcactggaagggacatgacggaaaatgaagatctcaagataattttcttgcaaattcacaatggaagataaaaggaaagagtggcaggcattctgcacacagagcagacgtttctttattgtcattgttcagcagaggaatcaactcagccttggtgaaactagagtgatgcccatggtggcatgtcagcatctccctcttagtggcatcagtgctagattgttgttgttggaagcaggagagtgtttagtccataaagtacagaacttcgatatcacagaagctagaagaactttactgccttcagcttcgtttaaagatagtagagagcttactcattcgttttagaaatatgtattgggtctctatgtcaggaactgctggcacagcagtgagattgaagatacaacagtgaatacaatagagggcctatcctcatagagtttgcctttcagaatgagggacagacgcagacaaatagaaaatgtcgattgtgtcagggagtattgagggctttgaagaatgaaatcgtgacccagaagagatgcttttagattggatcatccgtgaaggcctctatctagaaaggagacacttgggcagaattctgaatgaacttgacggacatctgaaggaaaaatattccagtcagaaggaacagtacgtgcaaagtccccaaaacttcaataagtgacgtgctccagaagcagcaaggaagcagaatgaggcctgaacagagtgggcagtaggaaatgcagtcatagagaaagcagggctgggtcacaggcctcagagactgtagaacattggctcctactctaagacaggaagctgctgtgagcattgaggttgggcgtggaaccatttgactttttatgaggatcactctggctgcagtgtggaaaatagactggacgagggagggcagttaggaagatgtcacggtaactcaggaaagcaataccggtgctttggacgagggtggtggcagaagagaaagtgagaagtattctggatatatttcagaagaaagtggataggattttctgatgggtgatatgtagagtgtaggagaaagagaagaagcaagattgactttaatgttttccacctgggcaattggtggactggaattgccacttgcagaagtgtggaggtatggaaggtatgggaagagcagattgccaggaaagttgagttagttttgaactcattgtgtttgagaggtctgttaaattatcaagtagtgatgttgaggtgtaattggaaaagtcaacctggaatttatggcagaagttgaggctgcagatataaacttgtaattttaaaaatgtatatttaaagccatgggagtgaatgagttcatttgagattgaatgcagattgagaagagatttagaattgaactccagggcactgcatagcaggaggaaaacctagtaaaagtggtatctgtaaaatagaggaacgaactgtcacaatttgcctggtactgaggattttctcagtacatgagactttaagagactgggacaccctgagacaattggttgccttccatgggaagaaagtatgtcaagagggagagagtgaacaactgtgtccaataaaccaggactgagcaaaaaccattgaatttggcatcatgaagtcttaggtgactttgacaaggcttgtctgttgtgaacagccaagtaaatgtgaggaccactctccaaaaggtaaagaaacatgcatgaggatacaggtgcgccagctggagacatcatgcctcttccccgtccccaccaggagtggcgtgaagcctccccagtgctgtaacgaggcagccaggtcctgtgtgactgcacatgtgacttggggcaagtcatttaacctctctgttttcactatcctatttgtgaaatattgtttagatttgtggtttgagtcagctatctgtatactacactgtgttaggagctatgtagattaattttcaacagatatggttctggggttgtaggaattttcaatttgagaacaaattgaatcttaccctttgtcaggagaaatagcctttgacatgtgttaggggcaagggaaatctcaaacttgcttaattttaaaaatgaatatttggttgtggataatttaagctttggtgatatttctaattattttttgtgtgtttctagtctactgaccagaagtctgaaaaaaacaactaaaaagaaagactgcataagccttcactagagaagtattgaaaattgcttgagggaagtgacggtttctttagcctagtgtctgtaggaccccagtgtagtgtttgttgaatgaatgaaaggaggcgtatcagtcaggttcactcagagaaacagaagctgtaggaaatccatatggatgtgtgtgaaggtattggcttgcctactgctggtgtgtggctaagcgagcttaaaagtccgcagggcagatagtcaggaaggaaatattcccaacagactgagctcccttgggcacaagctgaagcctggagtctgaactgccagagagcctctaccttcttagaaaaggcttcccactggctaagtcaggcccacccaggggaatctctcctttgattaacttaaagtcacctgtttagggactttaattacattggcaatagtcccttcacagaagcacctaaatgactgatgatgtaactgaaaaaatgtgtgtgtatgctacaaaatggctgcagtctcccttctgtcctccagctcttgcaggagaactctcttgtagctcaccctgtctgaaaacatactggaaaggaattcaaggaaatgtagttcagcctagccacgttgacacatcatgaagccgtcacaaaaggtaaagcctggtttaggagcatttgcatttgcagtcttaagtatttttgtcttatttttcaaaaggggttgggcacggtggctcacgcctgtaatcccaatactttgggaggccgaggtgagtagatcacttgaggccaggagtttgagaccagccaggccaacgtagtggaaccccgtctccactaaaatgacaacaattagccaggcgtggtggcgcatgcctgtaatcccagctattcaggaggctgaggcacaagaatttcttgaacccaggaggtggaggttgcagtgagccgagatcccgccactgcagtccagcaacggagtgagactctgtctcaaaaaaaaaaaaagtagttttggtttttaatttttgattttttcttatgttattacatataacgaatgatatgcatactctgaaaaatcatgacataaaggtgaccttgaaattactttgatgttcatttaaactagtctttggtctccactggctaggagaccacatatagcagaacagcagagaaagcaaaacagttaattttcatgtttggcttttgagcttccagggacccaagtcttgccttgaaccgatcttaggaaattcctcattccctacccgaccctgtttctaaactgcatccctgctgaaatgcaatgccactgtaactctctccaatatttgttttcttctttggcttaccactagatgtatgtatatatgtttgtgtgcctgtgtgtgtgtgtgtgtgtgtgtgttgactgcctcatagtaaagcctactcttgagattaagactcctgatagtttagagaacagaaatcttttttagttcctggttattacttgaatttgcaagaggaacaactgctaggaggcctagttaacagtagttagggtctccacccacttgccaagggcaagactagtttacaccacatttggaatgaccagtttcctcccactttagtttcagtgtagaaagagtaggggagacgaactattcaatgtcagcttgggtgtagtgccagaaccgtactcagtaatgctgtcattgctgttggtgcttaccagctcttcagtactggaatagcttcagacctcgagagtttatgactttatcatcaactgggtgtgttgcccttggcacattgccacacagtgcttaatgatgatatatgttctttatcaaattccccccaccaaataatggcattatttacgtgtgagaaagttgcacatttcaccacctcatggtttattagagtgcaattccgtgagaacaactgcctgtgatcctctgtatccccagtggccaactcaggagctcagtatgccctacccagtagatgctcagaacatcattgctgagtgaggaagtcagccatcattttctccctggatagtctctcctgtagataacaggggccgttatcagccaggtttttcatcatttgtggctttgaatttcagggacatgacaagtttgctttttgtttcgttttgttttttttttttttttggttttctagagacagggtcttcctgtcactcaggctggagtgcagtgatgtgatcacagctcactgcagcctcgaactcctgggctcagtgtttctcccatctcagcctttggagtagccagcagtataggtggtgtaccaccacacccatctaactttaaaaaaaaaaaaattgtaaagacagagtctcacttttttgcccaggctggtctcatactcctggctcaagcaatcctcctgcgttggcctcccgaagtgctgggactgcaggtgtgagccaccttgcctatccaacatgacaagtattattctctggcaggaagtgaaattttttctcactgatgattgcacacaaatgtcatatctccatgaggcttctactcactagttttacggctcatgtcaccttgcttcaaactatgcttcagtataattttgaagtgtatatttccattgcctctccttgagtaattgatattcttcacaataagtttacatttattatcacttttatttacttactattattactctgagcagccaatcttatgagaagctcagagtggaacgtgtgggtcctggtaaatatattatttgactcacttccaaacacacttaatattgcctggtgttttgattatttcaaaatatacagatttcttgaaaggcctgcaaaaggaaacaatcaaaattatagcggttaagaatgtgagtctgccttggtttgaattccagatgggccagtccctagctgtgtaatcatgggaaaattattaaatctctagcctcgctttcttcatctgtaaaatgagcatacaggctgagcatccctagtccgaaaatgcaaaattcaaaatgctccaaaatctgaaactttttttgtgcctccatgacgccacaagtggaaaattccacacctgacctcacgtgataggtcacagtcaaaacattgtttcatacacacaatacttttttttatttgtataagtttaagtggtacaagtgcagttttgctacatgaatatactgcatagtggtaaagtctggacttttagtgtctccatcacccaaatagcatccattgtattcattcaggaatctagcatccctcaccccctcccatcttcccacctctccaagcctttcatgtctagcattctgtgtccatgtgtacacattatttagctcccacttctaaatgaaaacatgtgatatctgtctttctgtttctgagttttttcacttaagataatggcctccagttccatccacgttgctgcaagagacatgatttcattctttgttatgactgaatagaattattcaggcacaaaattattaaaaatattgtttaaaattaccttcaggctatgtgtataaggtgtatatgaaacataaatgaatttaatgtttacatttgggttccatcccgtggatgtctcattttgtatatgtaaatatgacatgatatgaaaaattcaaaactctgaaacaccaattgaactcaatttgcagtaagaatgcatacctcacagggttatagtgaggattgaatgagacaatcctagtccaatttctttgcacatagtaatgctcaataattattacttaaatgggtataaactttatagtaatgaggttggggctggaaaaaatgcagtttcataatttcctatagaagtcattcaatcctgactctaaactctgtattccatgtggtggttgggtggcgtgggagagtcctctttatcctgtggggttggtcctatggaggtgtctgtggcagattggcagatgcatttgtcttgtgcatagatggtgtctgttgtttcctctggcagagttcaccagtgtcctaatgcaaacttagtcctcatctggctcctgcacaggctgatctctggctcctttagcccctcatggttcctgttgtttcattttcagagggacccttgtaaggactatagtcctctcttcagctgaccttcaggtccccagtcagaaccaagggaaccgactctgtcccttctcatagcacctgaaaaccccgggaaacgaggggaatgctttgctctcagctactgaggttgtcctgtcaccttctcttctgccctcctttgccatggcataggataatgtaagtcagcaatctcattactcggtatatagccagaggaatataaatcattctaccataaagacacacgcgtgtgaatgtttattgcaacactattcacaatagcaaagacatggaatcaacttaaatgcccatcaatgacagattggatgcagaaaatgtggtacatatacaccatggaatactatgcagccataaaaataatgagatcatgccttttgtgggaacatggatggaactggaggctattatcctttgcaaactaacgcagaaatagaaaaccaaatgctgcatgttctcacttataagtgggagctaaatgatgagaacttaccaacacaaagaaaagaacaacagacactgtggcctacttgtgggtgaagggtggtaagagggagaggagcagaaaagataactatgtggtcctgggcttaatacctgggtgataaaataattgtacaacaaacccccatgacatgactttagctatgtaacaaaccttcacatgtacccccaaacctaaaagttaaaaaaaaaatcccagacaggaagtagggcatattttgcctaatttgcagcttcatcctcactccctaacttacgccactcatgtctcctccatcatcagggacagcaagagtggggaggggacgaggcctgccacatctccattctctgatcttatttcctcttgcctcttcaacagcgctttgtctctcctctccagcttgaagcccttactctggtatgtgatttcaaagcgatgaaaaactggtttcgttagtacttcccttggatctgcccttgtctcccatcaaggcagtgcaagtaaagaatccaagatatttgttttgttggtccactggagggtagagatagagaaaaacagtaacttccccaccacccccaacctcccttgggctgatgactccaaagactgccataaatgaacacttcatagagctgctattaatatgacacaaatctacttgatctaagggattcttttactttcttagggtggtcattcctaagtctttggatttcacagaaaagaaaatatattttaattgaggactgacaaaggttgccaactttttatcaattataagaattgtttttataattaccatcaatttctattatttcttttactccccctctttccaactgtggaaggtaaaattgaagagcaaagaacacttatttcaaagtgagtaaatttagctatatgaaaactcagcagattgccctgagtttccttgcgtagctgcagtccagtggaaatttcttccagaccagcaccagtcgccccagtgacatttagaaatcactgccctggattgtttcagccaccgaaacactcggtgttcactgtcagctatgattatatatgaagtgctttcgagaaccaatgtatagcataacttaggccaaaagaaacactgtgcctaaacactcagccaaggagtgttgagtttgcctggatttctggaaaattgtctccgttccctagttcactgtatttgggtaaacaaaacatggcctcggagagcctttgcgggagaaattataaaaattcagcaaagctttgtgatctcattttggatctcctcaggattcctcatcaagttgcaattaaggagagaaaaattccgccttggggtgggattttaattactcatcatgttatgacttgactttctgtgctgcatttttttccatatcactacttctgtgtttgacagctcctccaaagagtcgctccgttttatgccaggagcgaagtacttactaagtcaaaggaaagcaaggcaaacatctactattgcctttgtgcttttaccagaaaactgggtgagaacctccttttccttttccctgcccctccagcctcagttttatgaccctgtggagccagtggactttgaaggacttctgatgacacacctgaacagcctggatgtgcagcttgcccaggagctcggggacttcactgatgacgacttggacgtggtgttcacgccaaaggaatgtaggactttgcagccctctttgccggaggaagggtaaatagttttctaaaatgtagatgtgattgggattgtcatgattgttttcaataagtgggtaggggagatgccttcaatctgaacttaaaaataaaataaaattactcaatccattcaaatgtgtgggacagctatatgatatcatcatgtaagtatagatagtttttaaattagtttggccagagattttgaaaagctatgtgaagactaagccagtgcaagggatgcaggaggaccaaatgaaatgctcaagaggaggttaaaagtgcaggctctggagccagaccacctggctgccagctcagtgaccttggctgtcacatgacctcccaaatcctcggtttctccatttgtaaaaatgtcaagatttttaataataattactgaaatgccaccatccagaagcattttaattgcttacagttatgagactggatcaagttagaaacataaggtaaacccacatttattgagcatctactatgttctgggtactgagataaaaagatgaataagtcaaagtccctcctttaaagaaagtgtcatgcagtgctaaaacagtggggagagctctgtagaataaatatgtgaatagctaattagggcttgagtttctatagttggctcttctatatgtttataggcttgggcattagtttttggcatcaaactaactgtggaattgtagctaaatgaaacgcctgttgcttctaaaatgtaaaaaaaaatgtctctttggaggtttaggataaacttttatttacatttattttaaaagccaaattaagattcatatcctcctggacaggttccatcttctcatcttccccagaaggtcccagaaagaagatcctgacacacagcccctgccctctttactctgagatattctagttctattttggattttatttcatcacagtttaaggaggttggatgataatgggctggtattattgtgaaccgttgctctcttgttcagacagtcctcactcacataggagaactgaccatatgtgtagctctgatgttttaaaaatacacacttcccaggaaagaaaaacattgtcatttttgggaaacatactcccccattttcagtccatttattcaggtatgactttagtataagttaacacctactatttcatctttagtgaagaatcatttaatttattcctttatgtaaaatttatggatgtttccaaatatggtcagaatcttggaaaaagctgtttaaaatgcttacagtagccagtcaccgcagcttgttcctgtggtcccagctacttgggaggctgaggcaagaggatcacttgagcccaggaatttgagttcagcctgggtaaaatagtgagaccctgtttcttacaaaacaaaaacaaaaaacagtacaatgaatttagaggaaggaggaggtttttttttttttgaaatttgataaggaagataatttctttacttagcatcagttttttagtatactgttgccttgtcaaaagaatttataggtaacatacctgtctgatgtctttaagacagcctctactatttcagttgttgccaaaaagtcttctgtataattaaggcaggggaaggtatcatcatcacaccagagtaaacaatagctgactcctgttgaacaacctgtgcctagcccagaactttatgttgagctgtgatggcgtggtagtgaaaaacatgaacgctacaggtgagctgcctggattcaggtccctgctccaccacttgctgtgtgacttggaacaagatccttaccatctcatttttctgcaaagtgagaataatagtaatgcctgccctatggtgctgattgagaattaactgaattaatacatataaagtgattgcctcagtgcataatgcacagtaaatgctacctaagtgtaaactattaatatcatatatgcgtcttattgtgtgccaggcagtcttctaagcactttgcacactaaccgatttaatcttcatcaaagctgtctactaaaaggggcactcttactactctaacagctttaaggagaggaaactgaggcacagaagggttgagtgactggcttatggtcacatagctataagcgatgaagctgggatttgggcaattagggcccagagactgcatgtgtaacctttacaatattttatctaatactaacagcatgtctctgttcttacctccttatcacagatgagaaaattaaggcttgtagcatttaagcctgtttatttctggtactaatgcatttgcaacaatagcaaaaagctttgctacaattgttatttttgatttcaagactctgaagcacttgaagagtattgctcatggtgcattccttaagtagacatgacaggaaccaactgaattaatgatcaccaacaaaagccagtgtttgcaatttcatcaaagcataagacaactgttctttttcctggctttcaaaaaggagaacacgcgtgtcctaacaaggttacacatgcataaaaaatatgtccaaattaccctgtcagagataggtatttatacttattttccttgttttgtattcgaatacagctagttctacctgtcttgtgtctgaatgccttcggggatagttataatttaacatgattctgtataataaagaaaacccacaaagcaaaaaaatgccaacatgtttgtctcatcaaagtaaaaatgtttattgccccaggaatacttcagacatttggaatgattgggcaagaacatcctaagcattctcactgataaggatttaaattcgtgtcatgttccttgctcatgattaggggttgttttgttgttttacccagtaataacgtgtttatttcattttctacctcattagggttgaactggaccctcatgtcagggactgtgttcagacctacatccgtgagtggctaatcgtgaaccgg

SEQ ID NO: 15563 - DNA, 108329 bp, Homo sapiens
ctgtaacaatttacgcgccgtgtaactgtgaatctttcaaaggtatgttttactggagtgatttctggttatttcagaaggataatttgtgtgttgcgtcattaatgaaatagtagtacgaaaaacctatagcatcttttactgcaggaggtaactttccatgccattttttcagaaaatctacttatgacttcagtggcttgctagactggcctttttatttgtacttttcctgtgtttcagaattgcagagtataataaaggcatgtcaagtgcatattgtgtccattttcaggtatattagataagctttacaccaagataaattagatatgcttattggtttaatttgtgctaatatatatttaattgaaaaatcaaaaaaatttttttaaattgactgaagttgtattccaaaacatgcaaaatttagtttaaaatagattggatacacttttaaattttaaacaaggtagagggtttagtgctttgcttttttaaaaagtaaatgaaggctgcagctttctgcagtagttgtcttgggaagtagtgtggacatcactcctaagagacgttaaggaagtttagctaacaggctttaaccctttctctccataccagcttttactcttttttttttttttttgagatggagtttagctcttgtcacgcaggctggagtgcaatggcaccatctcggctcatcgcaacctctgcctcctagttcaagcaattctcctgtagttcaagcaattctcctgcctcagcctcccgagtagctgggattacaggcatgcaccatcacatctggctaattttgtattttgagtagagacggggtttctccatgttggtagggctggtctctaactcctgacctcaggtgatccgcccgcctaggcctcccaaagtgctgggattacgagcatgagccaccatgcccggccaccagcttttactttaatgccacagccttaaattttctttcaggagaaattattttatgtaaagttacaaaggaaaataatgcttaatatctgtaagcattcgtttggtaagtttgctgcctcctcagtaagttttgatgaaagtgaattttgatgaattactaccttagccgggtagtgacgttaacatgtggcttagctgtccattttctaagatatcaagaaaccagcaacaataagtaaaattgttaaattatgcaagaatcacatgttcctacctgtcatcatttagtcttggttctatttgcatgtgaatatcctttagaatatattactcccagttattccgctttacttttctgaatctcttttcccatctcttgacttcaacttcagtatatggctcttgttccttctacctggagaacggaggcatgtggaagcccagaggattgaattcttttttttttcttttctttcttttctttttttttttttagatgaatagtctgcttaggaaatccatctccataatgtttacctggtatcgtgttgtaatgtcagaatgaagtggctgttcttccccttgagtcatcgtcccgaatgaaggttccccaaaagaaatcatcaacttatgtggtgatttccttttacctttaaaaaaaaatttcttttcatggaaagataatggaacatgtcggtaagattcatttctaggaaggcaaaggagtagtttatcatctaaagactctcaacctaaagctgttttagaaaactttccttaaaatgagaagccgtaggttttcgttgcattattttggctaattgaaaaataagaccaagtgcgttctgaccttcgtttctcttacctttatttttacaaccaccatttcaatggcccacttgctgatacaaatgattgtttaattttaaaaagcatttaattgaagtcaagttatttagaacctaatcatttacacgtctttgttgttgctgctgttttgcaagagtgaagagcttggagtcaggtgaatctgggatgaggtacagttgtcatttattagtcatgtaatttgtgacaagccacttaatctctctgaagacttcagtttcttcatttgtaaaattggcataataatgctgtccctagtagggaatatagaattatataatgggtcctttgtatatattggctagtattgctctcttacgatttggcactatggagacactgtgggagattaaaagaagatgatgaataaaaggtgacttcagctctgaagggctttatgatccatttgggagaacaggtaatgtagaatatactggcttcaaaagtggcaggtgtttagaagagaaaaggatacatgatgtgataggaggcaaaggcttgattgagaaggctgagaagacttagagtaagggttctcagccctgactggacattaaaattatctagggacaattcaatcagaattcctgggggtggggaccaagcatcagtattttaaagttccctggggactttaacttgaagcccaggttgagaatcatttaaacagctctgttatttatttatttaaaattttaatgtattttttgagatggagtctcgctctgtcacccaggctggagtgcagtggcgcaatcttggctcactgcaactcctgcctcccaggtccaagctattctcctgcctcagcctccccagtagctaggaatacaggcgtgcaccaccacaactggctaatttttgtacttttagtagagacagggtttcaccatgttggccaggctggtcacaaactcctgacctcaagtgatccacccacctcggcctcccaaagtgctgggattacaggcatgagccactgggcccggcctagttttactttttttttttgtaatggaatttccctctgtcacccaggctggagtgcagtgatgtgatttctgctctctgcaacctctgcctcctgcgttcaagtgattctcctgacttagcatcctgagtagctgggattacaggcagctgccgccatgtctggctaatttttgtatttttagtaaagacggggtttcgccatgttggccaggctggtcttgaacttctgacctcaggtgatccgcccgcctcggcctcccaaagtgctgggattacaggcttgagccactgcgctcggcccatttaaaaaaactttaaaggtagacgtattccaaatggggggaatatataaagaaaggtaacacttattttgccctgtgtgctttgaatttcagaaggtgtagtaagcaaagaccacttactaaccctacagatatatccttagaaaatacagtggtttctgtcataaatctgataaatcagatgagaggaagggtgtatgtttgatgttgatttttctttttgttttattggggtttttaaaaactataaatatcaggtctgatgactatgtgtataaacattttctaagtagataaaatattttcaaattttgcattttttagtatgaaggggatccatcatttgaagttggttttctagatgtgatgataaacttgtcccaggtctatttgacactcctaccaaaatcctttgtgaccagggctagaaggcagctgtggctagtaaataaccctgtgtgtagactcacttattggctttggcattctctattgccacagctgtgtgaatagattaaccagagaccctctggtgccagccacctattcaggcaaacaagtctataatcagtacctctgttaaaatgaaactgtaatatactattgtcttttcatttatttatttatttatttagagacagggccttgctctgtcgcccaggctggagtgcagtggtacaatcttggctcactacaacctccgcctcccaggctcaagcgattctcctgcctcagcctcccaagtaactgggaccacaggcgcaccattgcgcctggctaatttttgtattttttttgtagagacggagtttctccatgttgtccaggctggtcttgaactcctgagcttcagtgatctgcctgccttggcctcccaaagtgctgggattacaggtatgagtcattacacccggcctattttctgattgttcaaagtagaagccaggcacaatggctcatggctgtatgtaatcccaacaatttgggaggcagaggcaggaggatagcttgaagccaagagttcgaggccagcctaggcaacatagtgagaactcatctctacaacaaagttaaaaagaaaaattagccaggcatggtggcacatgcctttagtcccagctacttgcgaggctgaggcagaaggatcacttgaactcaggagttggaggctgcagtgagccatgattgagccacagtactctagcctgggcaacagagtgagaccctgtctcagaaaagaaaagagaagagaggagaagagaaagagagaagagaagagaagagaagagaagagaagacatacaaaagaagagtaacatacaagagaagagttaggagaccctgtctcagaggaaaggaggggaggggaggcgagaggacaagagaagaaagagttaggatctatgccctaaggaagtaaggaggatttgagactgtgtaggtggttaataaccttaagctacatattttatggagggaaaaatcctatttttaaaagtgagaatagaacaattttgaagtgaaatggaatgaattagctggaccataacggctctgactgaagaaaaggatgtaaaaagccacatcctggatatgtaccaaacaccatggttacatggcatgtttgtatatgtaacatttatttaaaaaaaaagtctcatagcttagaaggcatttatttttgttatgtgtataggcttctgtgcaataaagcagccttttttattttacagctcatgatgacttaaatggttaattgcctgataaatatggtcctcttttattcttctgattctgttgttcttttgcacttcatctttcaaggggttgggctattcttaggtttcactgattgcactggaagggacatgacggaaaatgaagatctcaagataattttcttgcaaattcacaatggaagataaaaggaaagagtggcaggcattctgcacacagagcagacgtttctttattgtcattgttcagcagaggaatcaactcagccttggtgaaactagagtgatgcccatggtggcatgtcagcatctccctcttagtggcatcagtgctagattgttgttgttggaagcaggagagtgtttagtccataaagtacagaacttcgatatcacagaagctagaagaactttactgccttcagcttcgtttaaagatagtagagagcttactcattcgttttagaaatatgtattgggtctctatgtcaggaactgctggcacagcagtgagattgaagatacaacagtgaatacaatagagggcctatcctcatagagtttgcctttcagaatgagggacagacgcagacaaatagaaaatgtcgattgtgtcagggagtattgagggctttgaagaatgaaatcgtgacccagaagagatgcttttagattggatcatccgtgaaggcctctatctagaaaggagacacttgggcagaattctgaatgaacttgacggacatctgaaggaaaaatattccagtcagaaggaacagtacgtgcaaagtccccaaaacttcaataagtgacgtgctccagaagcagcaaggaagcagaatgaggcctgaacagagtgggcagtaggaaatgcagtcatagagaaagcagggctgggtcacaggcctcagagactgtagaacattggctcctactctaagacaggaagctgctgtgagcattgaggttgggcgtggaaccatttgactttttatgaggatcactctggctgcagtgtggaaaatagactggacgagggagggcagttaggaagatgtcacggtaactcaggaaagcaataccggtgctttggacgagggtggtggcagaagagaaagtgagaagtattctggatatatttcagaagaaagtggataggattttctgatgggtgatatgtagagtgtaggagaaagagaagaagcaagattgactttaatgttttccacctgggcaattggtggactggaattgccacttgcagaagtgtggaggtatggaaggtatgggaagagcagattgccaggaaagttgagttagttttgaactcattgtgtttgagaggtctgttaaattatcaagtagtgatgttgaggtgtaattggaaaagtcaacctggaatttatggcagaagttgaggctgcagatataaacttgtaattttaaaaatgtatatttaaagccatgggagtgaatgagttcatttgagattgaatgcagattgagaagagatttagaattgaactccagggcactgcatagcaggaggaaaacctagtaaaagtggtatctgtaaaatagaggaacgaactgtcacaatttgcctggtactgaggattttctcagtacatgagactttaagagactgggacaccctgagacaattggttgccttccatgggaagaaagtatgtcaagagggagagagtgaacaactgtgtccaataaaccaggactgagcaaaaaccattgaatttggcatcatgaagtcttaggtgactttgacaaggcttgtctgttgtgaacagccaagtaaatgtgaggaccactctccaaaaggtaaagaaacatgcatgaggatacaggtgcgccagctggagacatcatgcctcttccccgtccccaccaggagtggcgtgaagcctccccagtgctgtaacgaggcagccaggtcctgtgtgactgcacatgtgacttggggcaagtcatttaacctctctgttttcactatcctatttgtgaaatattgtttagatttgtggtttgagtcagctatctgtatactacactgtgttaggagctatgtagattaattttcaacagatatggttctggggttgtaggaattttcaatttgagaacaaattgaatcttaccctttgtcaggagaaatagcctttgacatgtgttaggggcaagggaaatctcaaacttgcttaattttaaaaatgaatatttggttgtggataatttaagctttggtgatatttctaattattttttgtgtgtttctagtctactgaccagaagtctgaaaaaaacaactaaaaagaaagactgcataagccttcactagagaagtattgaaaattgcttgagggaagtgacggtttctttagcctagtgtctgtaggaccccagtgtagtgtttgttgaatgaatgaaaggaggcgtatcagtcaggttcactcagagaaacagaagctgtaggaaatccatatggatgtgtgtgaaggtattggcttgcctactgctggtgtgtggctaagcgagcttaaaagtccgcagggcagatagtcaggaaggaaatattcccaacagactgagctcccttgggcacaagctgaagcctggagtctgaactgccagagagcctctaccttcttagaaaaggcttcccactggctaagtcaggcccacccaggggaatctctcctttgattaacttaaagtcacctgtttagggactttaattacattggcaatagtcccttcacagaagcacctaaatgactgatgatgtaactgaaaaaatgtgtgtgtatgctacaaaatggctgcagtctcccttctgtcctccagctcttgcaggagaactctcttgtagctcaccctgtctgaaaacatactggaaaggaattcaaggaaatgtagttcagcctagccacgttgacacatcatgaagccgtcacaaaaggtaaagcctggtttaggagcatttgcatttgcagtcttaagtatttttgtcttatttttcaaaaggggttgggcacggtggctcacgcctgtaatcccaatactttgggaggccgaggtgagtagatcacttgaggccaggagtttgagaccagccaggccaacgtagtggaaccccgtctccactaaaatgacaacaattagccaggcgtggtggcgcatgcctgtaatcccagctattcaggaggctgaggcacaagaatttcttgaacccaggaggtggaggttgcagtgagccgagatcccgccactgcagtccagcaacggagtgagactctgtctcaaaaaaaaaaaaagtagttttggtttttaatttttgattttttcttatgttattacatataacgaatgatatgcatactctgaaaaatcatgacataaaggtgaccttgaaattactttgatgttcatttaaactagtctttggtctccactggctaggagaccacatatagcagaacagcagagaaagcaaaacagttaattttcatgtttggcttttgagcttccagggacccaagtcttgccttgaaccgatcttaggaaattcctcattccctacccgaccctgtttctaaactgcatccctgctgaaatgcaatgccactgtaactctctccaatatttgttttcttctttggcttaccactagatgtatgtatatatgtttgtgtgcctgtgtgtgtgtgtgtgtgtgtgtgttgactgcctcatagtaaagcctactcttgagattaagactcctgatagtttagagaacagaaatcttttttagttcctggttattacttgaatttgcaagaggaacaactgctaggaggcctagttaacagtagttagggtctccacccacttgccaagggcaagactagtttacaccacatttggaatgaccagtttcctcccactttagtttcagtgtagaaagagtaggggagacgaactattcaatgtcagcttgggtgtagtgccagaaccgtactcagtaatgctgtcattgctgttggtgcttaccagctcttcagtactggaatagcttcagacctcgagagtttatgactttatcatcaactgggtgtgttgcccttggcacattgccacacagtgcttaatgatgatatatgttctttatcaaattccccccaccaaataatggcattatttacgtgtgagaaagttgcacatttcaccacctcatggtttattagagtgcaattccgtgagaacaactgcctgtgatcctctgtatccccagtggccaactcaggagctcagtatgccctacccagtagatgctcagaacatcattgctgagtgaggaagtcagccatcattttctccctggatagtctctcctgtagataacaggggccgttatcagccaggtttttcatcatttgtggctttgaatttcagggacatgacaagtttgctttttgtttcgttttgttttttttttttttttggttttctagagacagggtcttcctgtcactcaggctggagtgcagtgatgtgatcacagctcactgcagcctcgaactcctgggctcagtgtttctcccatctcagcctttggagtagccagcagtataggtggtgtaccaccacacccatctaactttaaaaaaaaaaaaattgtaaagacagagtctcacttttttgcccaggctggtctcatactcctggctcaagcaatcctcctgcgttggcctcccgaagtgctgggactgcaggtgtgagccaccttgcctatccaacatgacaagtattattctctggcaggaagtgaaattttttctcactgatgattgcacacaaatgtcatatctccatgaggcttctactcactagttttacggctcatgtcaccttgcttcaaactatgcttcagtataattttgaagtgtatatttccattgcctctccttgagtaattgatattcttcacaataagtttacatttattatcacttttatttacttactattattactctgagcagccaatcttatgagaagctcagagtggaacgtgtgggtcctggtaaatatattatttgactcacttccaaacacacttaatattgcctggtgttttgattatttcaaaatatacagatttcttgaaaggcctgcaaaaggaaacaatcaaaattatagcggttaagaatgtgagtctgccttggtttgaattccagatgggccagtccctagctgtgtaatcatgggaaaattattaaatctctagcctcgctttcttcatctgtaaaatgagcatacaggctgagcatccctagtccgaaaatgcaaaattcaaaatgctccaaaatctgaaactttttttgtgcctccatgacgccacaagtggaaaattccacacctgacctcacgtgataggtcacagtcaaaacattgtttcatacacacaatacttttttttatttgtataagtttaagtggtacaagtgcagttttgctacatgaatatactgcatagtggtaaagtctggacttttagtgtctccatcacccaaatagcatccattgtattcattcaggaatctagcatccctcaccccctcccatcttcccacctctccaagcctttcatgtctagcattctgtgtccatgtgtacacattatttagctcccacttctaaatgaaaacatgtgatatctgtctttctgtttctgagttttttcacttaagataatggcctccagttccatccacgttgctgcaagagacatgatttcattctttgttatgactgaatagaattattcaggcacaaaattattaaaaatattgtttaaaattaccttcaggctatgtgtataaggtgtatatgaaacataaatgaatttaatgtttacatttgggttccatcccgtggatgtctcattttgtatatgtaaatatgacatgatatgaaaaattcaaaactctgaaacaccaattgaactcaatttgcagtaagaatgcatacctcacagggttatagtgaggattgaatgagacaatcctagtccaatttctttgcacatagtaatgctcaataattattacttaaatgggtataaactttatagtaatgaggttggggctggaaaaaatgcagtttcataatttcctatagaagtcattcaatcctgactctaaactctgtattccatgtggtggttgggtggcgtgggagagtcctctttatcctgtggggttggtcctatggaggtgtctgtggcagattggcagatgcatttgtcttgtgcatagatggtgtctgttgtttcctctggcagagttcaccagtgtcctaatgcaaacttagtcctcatctggctcctgcacaggctgatctctggctcctttagcccctcatggttcctgttgtttcattttcagagggacccttgtaaggactatagtcctctcttcagctgaccttcaggtccccagtcagaaccaagggaaccgactctgtcccttctcatagcacctgaaaaccccgggaaacgaggggaatgctttgctctcagctactgaggttgtcctgtcaccttctcttctgccctcctttgccatggcataggataatgtaagtcagcaatctcattactcggtatatagccagaggaatataaatcattctaccataaagacacacgcgtgtgaatgtttattgcaacactattcacaatagcaaagacatggaatcaacttaaatgcccatcaatgacagattggatgcagaaaatgtggtacatatacaccatggaatactatgcagccataaaaataatgagatcatgccttttgtgggaacatggatggaactggaggctattatcctttgcaaactaacgcagaaatagaaaaccaaatgctgcatgttctcacttataagtgggagctaaatgatgagaacttaccaacacaaagaaaagaacaacagacactgtggcctacttgtgggtgaagggtggtaagagggagaggagcagaaaagataactatgtggtcctgggcttaatacctgggtgataaaataattgtacaacaaacccccatgacatgactttagctatgtaacaaaccttcacatgtacccccaaacctaaaagttaaaaaaaaaatcccagacaggaagtagggcatattttgcctaatttgcagcttcatcctcactccctaacttacgccactcatgtctcctccatcatcagggacagcaagagtggggaggggacgaggcctgccacatctccattctctgatcttatttcctcttgcctcttcaacagcgctttgtctctcctctccagcttgaagcccttactctggtatgtgatttcaaagcgatgaaaaactggtttcgttagtacttcccttggatctgcccttgtctcccatcaaggcagtgcaagtaaagaatccaagatatttgttttgttggtccactggagggtagagatagagaaaaacagtaacttccccaccacccccaacctcccttgggctgatgactccaaagactgccataaatgaacacttcatagagctgctattaatatgacacaaatctacttgatctaagggattcttttactttcttagggtggtcattcctaagtctttggatttcacagaaaagaaaatatattttaattgaggactgacaaaggttgccaactttttatcaattataagaattgtttttataattaccatcaatttctattatttcttttactccccctctttccaactgtggaaggtaaaattgaagagcaaagaacacttatttcaaagtgagtaaatttagctatatgaaaactcagcagattgccctgagtttccttgcgtagctgcagtccagtggaaatttcttccagaccagcaccagtcgccccagtgacatttagaaatcactgccctggattgtttcagccaccgaaacactcggtgttcactgtcagctatgattatatatgaagtgctttcgagaaccaatgtatagcataacttaggccaaaagaaacactgtgcctaaacactcagccaaggagtgttgagtttgcctggatttctggaaaattgtctccgttccctagttcactgtatttgggtaaacaaaacatggcctcggagagcctttgcgggagaaattataaaaattcagcaaagctttgtgatctcattttggatctcctcaggattcctcatcaagttgcaattaaggagagaaaaattccgccttggggtgggattttaattactcatcatgttatgacttgactttctgtgctgcatttttttccatatcactacttctgtgtttgacagctcctccaaagagtcgctccgttttatgccaggagcgaagtacttactaagtcaaaggaaagcaaggcaaacatctactattgcctttgtgcttttaccagaaaactgggtgagaacctccttttccttttccctgcccctccagcctcagttttatgaccctgtggagccagtggactttgaaggacttctgatgacacacctgaacagcctggatgtgcagcttgcccaggagctcggggacttcactgatgacgacttggacgtggtgttcacgccaaaggaatgtaggactttgcagccctctttgccggaggaagggtaaatagttttctaaaatgtagatgtgattgggattgtcatgattgttttcaataagtgggtaggggagatgccttcaatctgaacttaaaaataaaataaaattactcaatccattcaaatgtgtgggacagctatatgatatcatcatgtaagtatagatagtttttaaattagtttggccagagattttgaaaagctatgtgaagactaagccagtgcaagggatgcaggaggaccaaatgaaatgctcaagaggaggttaaaagtgcaggctctggagccagaccacctggctgccagctcagtgaccttggctgtcacatgacctcccaaatcctcggtttctccatttgtaaaaatgtcaagatttttaataataattactgaaatgccaccatccagaagcattttaattgcttacagttatgagactggatcaagttagaaacataaggtaaacccacatttattgagcatctactatgttctgggtactgagataaaaagatgaataagtcaaagtccctcctttaaagaaagtgtcatgcagtgctaaaacagtggggagagctctgtagaataaatatgtgaatagctaattagggcttgagtttctatagttggctcttctatatgtttataggcttgggcattagtttttggcatcaaactaactgtggaattgtagctaaatgaaacgcctgttgcttctaaaatgtaaaaaaaaatgtctctttggaggtttaggataaacttttatttacatttattttaaaagccaaattaagattcatatcctcctggacaggttccatcttctcatcttccccagaaggtcccagaaagaagatcctgacacacagcccctgccctctttactctgagatattctagttctattttggattttatttcatcacagtttaaggaggttggatgataatgggctggtattattgtgaaccgttgctctcttgttcagacagtcctcactcacataggagaactgaccatatgtgtagctctgatgttttaaaaatacacacttcccaggaaagaaaaacattgtcatttttgggaaacatactcccccattttcagtccatttattcaggtatgactttagtataagttaacacctactatttcatctttagtgaagaatcatttaatttattcctttatgtaaaatttatggatgtttccaaatatggtcagaatcttggaaaaagctgtttaaaatgcttacagtagccagtcaccgcagcttgttcctgtggtcccagctacttgggaggctgaggcaagaggatcacttgagcccaggaatttgagttcagcctgggtaaaatagtgagaccctgtttcttacaaaacaaaaacaaaaaacagtacaatgaatttagaggaaggaggaggtttttttttttttgaaatttgataaggaagataatttctttacttagcatcagttttttagtatactgttgccttgtcaaaagaatttataggtaacatacctgtctgatgtctttaagacagcctctactatttcagttgttgccaaaaagtcttctgtataattaaggcaggggaaggtatcatcatcacaccagagtaaacaatagctgactcctgttgaacaacctgtgcctagcccagaactttatgttgagctgtgatggcgtggtagtgaaaaacatgaacgctacaggtgagctgcctggattcaggtccctgctccaccacttgctgtgtgacttggaacaagatccttaccatctcatttttctgcaaagtgagaataatagtaatgcctgccctatggtgctgattgagaattaactgaattaatacatataaagtgattgcctcagtgcataatgcacagtaaatgctacctaagtgtaaactattaatatcatatatgcgtcttattgtgtgccaggcagtcttctaagcactttgcacactaaccgatttaatcttcatcaaagctgtctactaaaaggggcactcttactactctaacagctttaaggagaggaaactgaggcacagaagggttgagtgactggcttatggtcacatagctataagcgatgaagctgggatttgggcaattagggcccagagactgcatgtgtaacctttacaatattttatctaatactaacagcatgtctctgttcttacctccttatcacagatgagaaaattaaggcttgtagcatttaagcctgtttatttctggtactaatgcatttgcaacaatagcaaaaagctttgctacaattgttatttttgatttcaagactctgaagcacttgaagagtattgctcatggtgcattccttaagtagacatgacaggaaccaactgaattaatgatcaccaacaaaagccagtgtttgcaatttcatcaaagcataagacaactgttctttttcctggctttcaaaaaggagaacacgcgtgtcctaacaaggttacacatgcataaaaaatatgtccaaattaccctgtcagagataggtatttatacttattttccttgttttgtattcgaatacagctagttctacctgtcttgtgtctgaatgccttcggggatagttataatttaacatgattctgtataataaagaaaacccacaaagcaaaaaaatgccaacatgtttgtctcatcaaagtaaaaatgtttattgccccaggaatacttcagacatttggaatgattgggcaagaacatcctaagcattctcactgataaggatttaaattcgtgtcatgttccttgctcatgattaggggttgttttgttgttttacccagtaataacgtgtttatttcattttctacctcattagggttgaactggaccctcatgtcagggactgtgttcagacctacatccgtgagtggctaatcgtgaaccggaagtaagttactttttttccactttttgtatataaatattaattttatattgctagtttttaaatatttcttaatactttgaacagttctaggtttacagaaaaattgcatggcaaatagagttctcatgtatgccttccttatccccactccatatcacacacacagttccccctattatgaacatctcactttagtgtggtacatttgttacagtagctgagccaatatggatatgttgttattaactaaagaccatagtttacattaatgtttactttttgtgttgtatattctatgggttttgacaaatgtgtaatgacatgtatatgcctttacagtatcatacagaattgtttcactgccctaaaaatcctctgtgttccacctgttcatcctccctccctggcaaccactttccttttttactgtctccataattccaccttgttcttcaatgtctttttgtggcttgatagctcattttttttattgctgaataatctttcattgcatggctgtaccattgtttatttatccattaacttactgagaaagaaagttctattttaaacataaagaatagactgcaagcttgcccaacccctagcccgtgggcaacatggagcccaggatggctttgaatgtggcccaacacaaattcataaactttcttaaaacattatgaggtttttttttttgcgatttttttaaagctcattagctattgttagtgttagtgtatttgatatttggcctgagataattcttcttccagtatggcccagggaagccaaaagtttgggcacctggaatagagcctttttgttgtcttctaattctgatgaattcccagggggaaaaattaagtgaattgaaacctggcctcagcttcagaggtggcattcgagtttatgaccaagaaataaattacttgctggccttccagtaagggatctttctctcctggattaatcaaaccttctgtgacattgttctgagctttttctctccatgccatggacctggacagcactctctcatgagaaacatctatgcacattgaaattctcagcctgcatgggtgtacctgttggggagtgagatgtggactctctacagattagggcacaccccactagagacacgtcacagaacctttgacaagacattagtagtttaaaattctgatagcctcactcctcctatacctcagtaagaattactattctatggggtaaatgatgaaagactttgaggattgggttttatctagctcctggaagggtgccattgagtttgtgctgaggttttctggagtaatgtcaatatgcacacattttcagcagcagaaaaagagaaagcattcattattaaaagttattaagagaaagttagatgccaatccatcatctgttctaaaatgaatggaaaacaaagtttgctgggcagtcagataaaattatggtttgctgataataaataaaagatttcagaacaagttgttctcaagtttttaaatgctatcattagaggtactttctggacattaaagatctaaaaaaaatctgagaaggaacaaatagaaagatccattttgatacatttggttttcagatttattttctatttcgggcttgtccactttttcatttctcatggcaatgcacgcttcttggagtagtgatttttcttgatcttgcacaaatgtaagagaaaaaaatgactctttttggaatactcgttgaaattttagaaataattatgaaacacaaatcactcagtttcactctagacagataatcatcatgaacatttgatgtctgtcctttgaatagtgttgggtttttttggtatatatttgcgtgaaaactaaataagattataatatcatttttgtaacatgcattttcagttttcacagtaaagagtgattctcttcctttgctattaaatatgcttcctcaatacaatgattgatgattgcataatatatttataccaaaatttatttaaccaattttaatatttaggtgattccttccttttcagtgttgtgcttaaaatgcaaaaacatccttctcaggaaaaatttgtacatatttatgatttttttctttggaattaattcctacaagaggaatttctatgtcaaaggatatgcacaaatttaaagatttggaatactagatcaaacattatgccgggcgcagtggctcacatttataatcttactcagcactttgggaggttgaggtaggaggatcccttgaacccaggagttcaagaccagcctaggcaatatacagagaccccacctctaaaaaaattttttaaaaaattaactggatatgatgacatgcacctgtagtcctagctactcgggaggctgaggcaggaggatcacttgagcccaggaggtcaaggctgtagtgagtgacgattgcaccactgcacaccagcccaggcaacagaggaagaccctatctcaaaaaaaaaaaaaaaaaaaaagccaggcacggtgctcatgcctgtaatcccagcactttgggaggccaagacgggtggatcacctgaggttgggagtttgagaccagcctgaccaacatggagaaacccagtctctactaaaaatacaaaattaaccgggcatggtggtgcatgtctgtaatcccagctacttgggaggctgaggcaggagaatcacttgatcctctaaaaatagctaaactgggaggcagaggttgtggtgagccaagatcgcgccattgcactccagcctgggcaacaagagtgaaactccgtctcaaaaaaaaaaaaaaaaaaaaaaaaaagattattgacactacatgcatgaatcctcaagaatattagatgttataatttatcaacatttccaattttatttgataaaaggttgtcttttttttcattttcttttactattagattaggcatctttcttctatatatttcttggccattttttatttttcctggtgctctgcttattcgtgaaatttgtgcatccctattaatgtatttgtctagtctgatttatttttataagcacttttttggtaaagatattaagccttgtctaccatgtattaaaaatgtcttccccagtatgccttttgtcttttaaagttgtttttaattttcaacattcagaattatttatgtcattaaatctatattaatatttttccttatgtttaattttggcatcatgcttaaaatttgattcacaaacttattattattttctaagagtatgggattaaagcattaatccagatcattagccacttgactgttgcttctgttcccttatgtgtctccatttgtttttatcttttctacagaagcaatggttacccatatatttattatatgcaagtttttgcatcttgttcccctaaaaaagaaaggaatatgtgttttaattttatgtttggcaacattctagggatgggattaccattggcccagttctctgcacccctgtgtaatggagcagttcccttcttaacggtcacctagtggacagggagaagtgtacaacttcagaactcattgtcagtttctggcaagctttcttgtagaaaagttgcatctctttctatccctctgcctcattctcttgcactctgaatctaacactctgcccatgaaaactaaaattcctagcacacactcctcccagggatcattctgtctctatatgcacctgtcgtattttatctgtggggagaatccagtacactattgccagatgtccttcatctcccaacctcacacagtacatttttagcttattgttttctgtgagttgtatctgtattgttttagaatgatggtagaaggagaaggacaaggagaaggtggtgattcatataaatgaaaccagctggaagctgtgatgctttcatagataagccactattatgaagaaggagacttcagatttctgtatagacactgaccagggactcgtgggcaggaaggtgtgcaacaccttcttatctttattcagtgagttcccctttggggagacaaagtttggtacatccttctctttccagctccatctgatccacagaggttctgtccagattcaggcattaagttatctcttcatttggatgagtttccagtttttctgtgtcttcataagtggtttactagaaagtcggaggaggatgcaataggggttgctggccatttgttaattagtgattaattatttagctctcctttaattggttatgtgccaaatcatgtatgattgttttgaaagaaatcaagtaatatggaggtgcattaaggaaaaggcaaatctcatgcctcactacttaccagtgtcctacccttcccttaactcactcttcactgcgtaaagcccagctgtgtagcttccagatcttttcataccctcacaaaaaatatttgtctatttatatttttcacataaagatatatgtattaatgtatgtacttatatattacaaacatttctttaaaataactgtccatgtcagagctatatcccattctactgaaatgctgcctagtattcaaagggtgaaggaatgtgtcctaagttactgaaactaaatgaccattttggttgtcaccatttttcataattgcaaataatactgaaacaaacatatctgcacatttgccccatacatgtgtgtgaatatttctgagggtagaaatgaagccagtgtacatggtatgctctgataggtactgccaaattcttctccagaaaagtcgtgctgtttcattccattaccaactgggcattaaactggcgtgttcccatattcttgccagtgctggatattatttattaaaataaaatttcagttcctccagtcttcttttagttattattttaatctggaagctattacacctactttctgaatacagtttcctatcaccaagtttcctttccttatgtgttctaaaatcccagttaaatatgcacttaaccatacaaccgtaagtcccactcttgagtatttacataaaacctatgtgcaaatacagcagtttagcagttttatttgtaattgccaagactgcatagcagttttatttgtaattgccaaaaactggaagaaaacccagattgtactcagttgggtagtagataaacaaactctggtaaatccatacaatggaatactactcagcagtgaaatggaacaaacaattgatatatacaacaacatggatgaatctcagatacagtatgctaagtgaaagaagccagacaaaggccgggcatggtggctcatgcctgtaatcccagcactttgggaggctgaggcaggtggatcacttgaggtcaggagttccagaccagcctgaccaacatggtgaaaccccgtctctactaaaactacaaaaattagctgggcgtggtggcacgtgcctgtagtcccagttactcaggaggctgaggcaggagaatcgcttgaacctgggaggcggaggttgcagtgagctgagatcatgccattgtactccagcctgggcaacaaagtgagattctgtcttaaaaaaaaaaaaagaagaagaacccagacaaaaaagataactgcatgattccatgtatctgacattctggaaaagatgaagctacagggatggaaaacaggtccatggttcccagggtctgggagtggggaagagggctgactacaaaaggacacgggagtgccctttgcgtggtgctgggactgtagtgcccatgatgtaaaatctgccttggaccattacattagaagaaatcaattccagttatcccaatattccctccaagtgaaatactttggtagcatatataataataattcaataagtattagctattatatttattaagtagtacctatcagaaaacatacttatattagcatgtcaaaggaatgaacacaaaattctctcccatatattgaacgcaccatggaggggggacctgccttcctctggaggaccatacttagtgaagccactttgccttataaggacatgcctttgttatccagaaccaagcagtcaaacactgatttagttagctcctttatttctcagttatctcctgctgatattacatttctccataatatctagagataggcttttatgtccttgctagctgtggtaatggttttgaatcccacttagggggcagaggagtagagtaatggccacttgtgttccctcccaccctcatcattctacagggcatttgccactcaagtactgtaattgagacatttaaatcatacaaataatgctgcccatgaaggatagaggaaatttttagatttccttttaaacctaacagagaaagattaagttacataaaaatgtaaaatacatgatctccagtacattgaaggaaatgtattttcttacttgaaatgtttgtgttacttagactggaagatttattaaatgatttccattctatcactcatgtttacagcaccaaatttggtgtccttgttctaaaaacaatagtacttttctccccatgacttttgaaaatgattactggtttactgattagcatggcgccatgtttgcttgtttgtccaaccttttatctgcatattttgataatgttgtgtggattaatatttgatgacatcctttgggtgatattaacgattttaagctttatttcttctgtcattttctctaaatgaaccaaagagggataaacttcagaatgtttttgatgcctggtggagagctgaactcttaagaaattaaacttgtttacatactatatttattcttgccgcagagacagtgaaacatttcatgagtgttatgggcagcatcataaaagcctttagactttgtttttcatctggggtgattaaggtaattctgaaggaaggttgagctcaaggagagctgagatatcaaggaatggggtatcatctgttttattactccatattttactcccagtgaagtggtaaacaattaaaattcaaacacatcagtgcatataattcagttactcccagaacaccataaaaatgtttccctgatcaataattgcttattatgacatgcatttgttgtgctagctgtcaaggtgcttagctatttgctttctaaaagtatgaaaagcacgcccggctcatcagcctatgtggtaacaaagagcaatccagctgtggatgtcacagagccactcttgacctgttgtgcatagactccctccccacaaatccaaacccactaagactctccaggctctgttaacacacaccagcctggttcagcttggatgccctcctcacaccatgtgggttctgattttccatgccaggcagtccatcttaaatggatgcatcctcaccgtgtttgggcttcaacttcctattctggacctcctcggctactccctaccccaaggcatggagggctgccttgttctgatgcaccttatgattttagcaccaaattgtacaggaagggagagaagggaaaggagaaagaagatgtgaaaggaaagagagggtagggaagaggaaaaagaagatgaggaacacgtattattttctaatcctcacaataggtcctcaaaatgagcaacatttccccctatttcatacttgaggaagctgtgactcagagagactaaggcacttgcccaaggtctcttagtacattaaggagccagcgtctgcacccagttccttctgactctagagcctggattctgctggctgcaccacactgtctttaaagagaacactctcaaaacgcgcttggtctttggattgtctcaaatgtgttagaatagtgttttaagaaaaggaatgcagatctcctgggaagcaataggtcgagttcatttcatgagaatcatttttctagccattggcctacttccccatttttctcctgtctgcatctaggtgcaacaggaacttggctttatttgactccattgccagggtggggtaatgaagctgggactctcttgtagccagcggcagtgagccagcagtctcactgcctacccagtgatggttccttctgtggccagcacttctggaatgagtcatctttacatgtttgccaacccttgtcctctcctccccagccaggttcacccttgctgctgtcaaggagctttgagactttctgagatttttaaatggggaagtagatgttaaacctagtatgaggaagagagggaaagtttgctctggtttcaaacacacagtcatagaagatgctagtcttaatgctttccatagcaaaaaccctgaaggcttagagtgtacacattgtgaactgaacttttaacattattgtgtaactcatttgttaatgcctatttgtcattgactgtggggtccatgtgaaaaactcccacaaacactctaacaaaatggaagacagaaaagaaagcaagcatcatttgtgtacaatagccaaagaacaatagccaaataaatttgatggtctcaaaagttaagcatcttttgaagagaaaatttgattttagggccaggtggggtagctcatgcctgtaatcgcagcactttgggaggcagaggcgggtggatcacctgaggtcaggagttcgagaccagcctggccaacacggcaaaaccccgtctctactaaaaatacaaaaattagctgggtacggtggcgcatgcctgtgatcccagctacttaagaggctgagacaggagaattgcttcaactcgggaggcggaggttgcagtgagccaagatcatgccgctgtactccagcctgggtgaaggagccagactctgtctccaaaaacaaaaacaaacagaaaaaagaattgattttgattttttcagatacagtgcatgaactttttatcataaaatattaaagctggggaaaatatcttagaattcacctcatgttcatgctttaccctgtgaagaaacagaggcacagagagaaataacttgaggataatggaaacaagcacacatctgtaagtgtgtgtgtgtgtgtgtgtgtgtgtgtgtgtgtgtcagagagagagagagagatgttcctttgtaagtaaacactcttggaaatagccgcattttattataacacaaaaagtaatgctaaagctgatatagttctggttgctaagcttcacacacaaaaggtctttaggtagctgcttcctaatttttatttctgtggcccaaaagtctccttgtaaaccttcgtgtcatgtcatactaaacctttgacatcaataccctttaaaatgtacaagtccttaaaaaaaaaaaaaaggcaaagggcaaatactaatgtgggaaatttgaattttaattaactgtttgtttcaatgttaggataaattaatgttagataaattctttggtaatttttccccctaaaattggatttttcaagaaacatcactggttcagtatattgttatttggggtagcataattttaggcgataacttaatatttgcatatatttgtcactactttgagttggtttttgtcccctgacccccagccaggatgttagatcacacagatttttttttctttgagcccttagggagagtccaaaacagtcacttcatgtactaggaaagtttacccagtcagcacacacagatatgttgttgcctacatttatatttgtgagagtgactgttaagaaactagcaggtttataaaatccgtgtgagaatttctctcaaataactgttaatggacaatccagcaatcctcccatctcaggctcccaagtagctgagactacaggcaggtggcaccatactcggctaattttttgtgttttttgtagagatgcggtttcaccatgtcacccaggctggtctcaaactcctgggctcaagtggtgctcccgccttggcctcccagagtgctgggattacaggtgtgagccactgcacccagcctgtacattttccttgaaatcgtttttggatgtttagtcttatttccttattcagagttcacctgtttattttttttttcatttccccaatttagcctgcgtttcacccagccctagcaatataggtttgggtcagagaaattcaagcggccaggggatgctgaagatggcccattatggccgggcgcggtggcacacatctgtaatcccagcactttgggaggccgaggcaggcagatcacaaggtcaggagatcgagaccatcctggctaacacagtgaaaccccgtctctactaaaaatacaaaaaaattagctggctgtggtggtgggcgcctgtagtccaagctactcaggagactgaggcaggagaatggtgtgaacccgggaggcagagcttgcagtgagcagagatcgtgccactgcactccagcctgggcgacagtgagactccgtctcaaaaaaaaaaaaaaaagatggcccattgtggtaagccttgacttgaattagtcaccaagctagtcttatctcttttctaggctaattcttgttttttgtttggctcaaaacaaattgtttgtcttcagaacacaataaaatccagggagagtgtcctgttcttcctacagacgtcactgggacatcttattctttaattaattcagtcaactaaaattggtcaaatacctgctctctgtgccagagttataaactttgtatttgtataattgctagtagctctcttacatttcttactttatctatctggcatttgatctacctaataccttccaatatcacctcatgtccctttaccagcttggtggtttttctatagttcaggaaatcaaacaaaatggtgtgtgacctggaggtactagaaaaacaatagcaaaccaactccaaagccagcagaagaaaacaaataaccaaaatcagagctgaaaaaaattaaaacgtgaaaatccatacaaaagatcaatgaaaccaaaagtttgtgattcaaaaaaaaaacaaggttgatagatcactaactagattaataaagaaaacaagagagaagatcgatccaaataagcacaatcagaaatgacaaaaatgacactacaactgatgcctcagaaatataaaaaatcctcagagactgttataaatacccctatgcacacaaactagaaaacgtagaagaaatggatagattcctggaaacacacaagccccctaaaattgaagcaggaagaaattgaaatcttgaacagaccaatagtgagttctgaaattgaatcagtaatacaaaacccaccccaaaaagcccttaatcagatggattcacagccaaattataccagatatacaaagaagagctagtaccaatcctactgaaattatttcaaaaattcaaggaggaaggactcctctctaactcattctgcaaagccagcatcattctgataccaaaacctgggagagacacagcagaaaagaaaacttcaggccaatatccctgatgaacatcgacacaaaaatcctcaacaaaatactacaaaccaaatccagcagcacattgaaaagttaattcatcacaatcaagtaggctttattcctgggatgcgaggttggttcaccatacacaaatcaataaatgagactcatcacatagacagaattaaaaacaaaaaccacaggataatctcaatagacacagaaaaggcttttaacaaaattcaacatcccttcatgttaaaaaccctcaacaaattaggcattgaaagaacatacctcaaaataataagagccatctattattcaactatccacagccaacatcatactgagtgggcaaaagctggaagcgttcctcttgagaactggaacaaaacaaggatgcctactctcaccacttatatcaacatggtactggaagtgctagccagagaaatcaggcaagaaaaagaaataaaagacatcccaacaggaagagaggaagtcaaactagctctgtcacagtgcaggcaatataattctgtacccagaaaacactgcagaccctgctaaaaggctcctagaactgataaacaacttcagtaaagtttcaggatacaaaatcaatgtacaaaagtcaataacatttccacacaccaataatgtctaagttgagggccaaatcaagaatgcaattccatttattttatccttttgaataaaatacctaggaatacagctaatcaaggaggtgaaagatctctacaatgagaattatgaaacacactgaaagagatcagaggtgatacaaacaaatggacaaatattccatgctcgtggataggaagaatcaatattattaaaacagccatagtgcccaaagagatttttagattcactgctattcctatcttaattagcaacatcattttttcacagaatttaaaaaaaaaaacctattccaaaattcatgtggaaccaaaaaacctgaatagccaaagcaatcttaagcaaaaagaacaaagccggtggcatcacactgtgtgacttcatactacactacaaggctacagtgaccaatacagcacagtccaggtacaaaaacagacacgtagaccaatagaacaagataaagaaccagaaataaagctgcacgcctacagccatctgatctttgacgaagttgacaataacaagccatgaggaaaggtctccctattcaataaatggtgctggagcaactggctagtcatatacagaatattgaaattggacccctccttttaatcatatacaaacattaactcaagatggattaaggacttaaatgtaagacctaagattacaaaaaccctagagaaaaaaactgggaaatactattctggccattggccttggtaaagaatttatgaataagtccccaaaagcaatggtaacaaaaacaaaaattgacaagtgggacttaattaaactaaagagcttctgcacagcagaagaaactatcaacagagtaaactgataaccaactgaataggagaaaatatttgcaaaccgtaaatctgaagaatgtctgatatccagaatctataaggaacttagataattcaacatgcaaaaaaccaccccatttaaaaatgggcaaaggacatgaacagatacttctcaaaagaagacatacatgtggccaaaaaatatatgaaaaaatgcttaacatcactaatcattagataaatacaaatcaaaaccacagtgtgataccaactcacaacagtcagaatgcctgttattgaaaagtcataaaatagactgggcatgtggcttatgcttgtaatcccagcattttgggaggctgaggcaggaggattatttgaagccaggaggttgagaccagcctgtgcaatgtagcaagactgtgtctctacaaaacatcaaaataaatggaaaaaaaaaaagaaaaagaaaaagaaaattaactgggtatggtggcgtgtacctatactctcacctactgggaggctgaggtgggaagattgcttgagcctaggaattcaaggctgcagtgagctataatcacaccactgcactccatcctgggtagcagaacgagaccctgtctcaagaaaaaaaaaaaggcaaaaattaacatgttggaaattagttcagtcactatggaatgcagtgtgaagatttctgaaagaacttaaaacagaactaccattcaacccagcaatcccactactgggtctatacccaaaggaaaataaattgttctacaaaaacgacacatgcactcgtatgttcctcacagcacaattcacaatagcaaagacatggaatcaacctagatgcccatcgacagtggactagataaagaaaatttggtacatatacaccatgaaataccacacagccataacaaagaacaaaatcatgggggtttttttgcagcaacatggatgcagctggaggccattatcctaaacaaattaacacaggaacagaaaaccaaataccacatgttcttatttataagcaggagctaaacatcgggtaaacatgggcataaagataacacggtagacaccagggattactaaagaagggaggatggaagcaggtgtgggttgaaaaactgcctattgagtaccatggtcactatgtgggtgacgtcagtatcatgcatacatcaaacctaagtgacatgcaatttacccatgtaatgaatttgcacatgtatcccttgaacctaaaataaaagttggaaaaaaataaaagataagatatcccgtatcctcaataaaaataaaagtggcgtgtttgtgcacttgactttgtaacatgttttccaaagatgtctttgagtcataaaaatgggaaatacacatgttggtttctctagtcatcacttgacaacttacatgttttacctttcttatgatggtctgtctcatttcttcagtgacagggctagacattctgttttaaactcttcccacagctgtatattattcaacacaactttaacagagttcatagagtggagattgaggatgtttgcaaagttaaatcatttatttttattttttcttaaccatgtcccgcctgctttattcattattaagaacattgatgtgaagattaaatggttttctctatttttatcttcaaacgatctctatttgtggcttctgcacattgctagatttattccagccacttacactagggtcatagtttagcttcagctcggagccaaatgccccacagctgaaatgaccgcacctctgaagtggcattttcccaggccatgcctccctttaataatgagccagccagggggtaaatttgtatctcattacaacagagccttgtattaggcctggagaataattaaatgtgaggaattataattggttccctctttgaaagctctctcagcaccatgtctacacttaagccattacttttatttttaatctaatggtttgccgctctctctccctctttctctctccaaattaaatatcaaccataaaagaaaccaaggaagtccagaaatctgtggctttaaaaagactggatctcgaaaagattttcacaagacgcttccgaaacagacgtttgagtcggaaaccttggagtgcagtgaacccgctgctcaggtatttcctgtcaacaaacatggttaccaggttactgggctcttctgcccagggcatgctgtcagttttacaaactagaataaacgatagacgcatagaaagtttgagtaggaggaactttaccatctgagtcagtgattttttttttcaaacttatttgtagctgtagaaattggtgttcaaatgaaaacccagaaacccaatgattaaaatagaaaaaagtggaaaagctctaactgggggacagagacaccttgggcccatccctacgacagttcctgcagagactcttggtgcccctaaggcaaactacagagtaatgaaaagctctatgctgaggccagaatacctgcattctcctagtgattctaccatgtactaactctctaacttcaagcaggataattaaacttattgggcttcagtttcctcccctgggaaacaaggatggtaatactaactcatgaggttatttgagtattaaatgagttaatatccataaagaattagaataatgccaagtacacttagtgcctagtcaatgctggtcactgttattgttattgtcattattctttttcttttttttttttgttgagacagagtctcgctctgtcgcccaggctggactgcagtggcacgatcttggctcactgcaagctccgcctcccgggttcacgccattctgctgcctcagcctcccaggtagctgggactacaggctcccgccaccacgcccagctaatttctttttgtatttttagtagagacggggtttcaccgtgttagtcaggatggtcctgatctcctgaccttgtgatccgcccgcctcggcctcccaaagtgctgggattacaggcatgagccaccacgcctggccagttgtcattattcttataaagtaattacagtttaaaattcaagttaaagtgtacatattgtgaaatgagcttttaacactattctgtaactaattttttaaatgcctggggtcatttgaagaactccagcaaacactctaacaaatagaagacagaaagaaagcaagccttcatttgcataaaacggccaaagaacaatagccaaataaattccatgtttccaaaagttaagctctatacacctatgctcacagcagcattattcacagcagccaaaaagtagaagcagcccaagtatccatccataatgaatggataaacaaaatgtggtcgccaggggctgggggagggaggagtaggaagttattgtttaatgggtagagtttcggcatcccaagatgaacagcattatggagatggatgctggtgatggttatactgcagtgtgaatgtgtttaacactactgagctgtccaacctgcccattttatagatgagaaaaataaaattgagaagaaaaaatttgttcaagtttgcacagaacttcttgtaaactaatatagttttcagcttccatgtgtcttcataatacaggaatctcaccatgctggaaatgattcgaggtttttaaataatactaatttttcagacaaggtggtccccctaaagcaaagcccactacttacttggagcttcacagtagaatcagccatcatttccagcgctaaatatgacaggcttactgagggatagaatacctggatgctctgctctatgggagatttaaggaatttttcatcagtaattttgactgaattccattttcaccctacatgctgaccaattaaattgttcctcttaatgttagtcagatagaagccacggtaggtatttcagcagaagaaatttaacacagggaattgattaaaccggttttggaggtctgagagaaccaaaagggaaaaatggaggctatcctaaaatcgtcattatgggaaacagcacaccagcctggggctggggtatacggcagtggttctccacttcagcttcatcagaatctcccagagggtttgttcaaatataggttgctgggccctgtctgctggaatttctgattcagtaggtctggagggtgaacctcatactttttaattagcatttcctaagtgatgctgatgctgctggtcccaggaccacaatttgaggactgcaggtctaggggaagatcttggagttgtcagaacgtagaagctcagaagaggagcctgagagcaaggactgaaatccctgagaaggtactgcccagctggtggtgttgtctcaagatctcagagggaaaaacctcatgaagcctggactcacgcctcacaggaggagaaattgcccggctggtgctggtaccttcaaggaggtaagataagggtgattctggaagtaccaaaagaacctgaaggctagaaccagctgtcactacgaaggtgagaggaatagcaagaggaaggagccaggccctttgacctccttgaaccatccggtaaccctgtagtgctccctattgacagaacctaaagggagcagcagacacagcggaaatatgatttgctgacctagcatcaaagaacaaggcataaaagggtgaatttggagcccagaaacaataggtgaagaccagcgtacacacaaagcacacgctttcctgcagcatactagcagagaactcaagtcactgtgttgtgtgtggttttttttgttttttttttttttttttttttttttttttttttttttgagatggagttttgctcttattgccaggctggagtgcaatggcatgatctcggctcactacaacctccgcctcccaagttcaagcgattcttctgcctcagcctcccgagtagctgggattacagacatgcgccaccacgcctggccaattgtgtatttttagtagagacagggtttctccatgttggtcaggctgatctcgaactcctgacctcaggtgatccacccaccttggcctcccaaagtgctgggattacaggtgtgagccaccgcacccggcccactgtctgtgtttaagagccaacttgatcatatgatccagcagtctcactactagatatatgtccagaggaaaggatatcagtatatcaaagagacatctgcactcccatgtttattgcagcactattcacagtaaccaagacgtggactcaacctaagtatccatcagcagaagaatggataaagaaaatgtggtatgtatacacgatagaatactattcagccataaaaaaatgaagtcctgtcatttgcatcaacatggatgagtctagaggataagtgaaataagccaagcacagtaagactaatactgcatgatctcacttatatgtggaagataaataagttgatctcatagaagtagagggtagaagtggtaactagatgctgggaaggatggatggagaagggaatagagaggttggttaacggttacaaaattatagctagataggaggaataagttctagtatttgatagtactgtaaggtgactagaattaataataatttattctgtgtttccaaatagctagaagaaaggattttgaatgttcccaacacaaagaaatgataattgaggcaatgggtacactaattaccctgatttgatcattacacattgtacacaggtattgagatattacactgtattccataaataggtacaactattatgtgtctattaaatttttttaaagagccaaattgtacaaaagttgtttgttttgaaatattggaataatactcatcatggagagaatctcagactgcgagatgacagcaatgttttcaattccactctcattcttgtgcaccttcttattgagtagaatggtgaggccacatagctagatttataaaatttaaacaagtatatgataagattccttggtacacgtagattttataaaaattagattatattatgcataatattgcaaaacttcctttttcatattagcaatatactgtgattatctttctcttccaattaatacgtgttctttcttttttagagacagagtcttgctctgtcgcctaggctggagtgcagtggcacgatcttggctcactgcaacccctgcctcccaggttcaagtgattctcctcccttagcctcccgagtagctgggactacaggcatgtgccacgacacccggctaattttttgtatttttagtagagacggggtttcaccatgttagccaggatggtcttgatctcctgacctcatgatcccccggccttggcctcccaaagtgctgagattacaggcatgagccaccgcacctggccaggttctttcttttaatggctacataacattctattttatgaaagttccaaaatctcttaacacttcctttttgggggcatttagtttacttctattgttttgctatcacgaacagtgtttcagagatgcccttgccctcacattcttgcacacttgccagttataccctacggataaattcttagaagtgaaatttctagattaagggatgagtaatgttagatttttttacttatatgtatcttgatatccttttaaataaatttgggaaattaaagtcattttccttaaactcttataaattttaagaaaaacaaaagtattaataatcgaagtgttaatattgattatttctagcacattcagtttggggaaaatttatgatctagtagagtagtacttttgtgaggtagatgtcacaaaaaatgtgtagtatggagaaattgtccagtagtatgtccatttagtagaattttgagaataacattttgccataaattttatagatatttaccattaatccatttgtagtcctacaacatatagttgattacagttatacattttttgctgagtctttggttcaaagcatgcagttcccaattacaaagacattcctaatggaataaaacatccactttgtgactgatttaaggttgttttcttaaagcacaccgcagccaaaagtggacacagcttgaatagcaaattttttcctttttgttgttgttgcttcatccaataactgttaccaaattcccgtagaaaagtgttgcccactcccacatcgacctttggaagcataacattcagctttggtgtctatacacaatttaatttggaaggctcctcacaaatcatcttattttccagtttcaaaaaccaagttctgagtggagattaagacagggtctctttatttcccagtgcagtctcctatctatttatttgtgaatgaatgaattagttaattaatgagccagggtttcactttgtcacccaggctggattgcagaagaagtcatcgtggccaagcgtggtggctcatgcctgtaatcccagcactttgggaggccaagacaggtggatcacttgaggtcaggagttcaagaccagcctggccaacatggtgaaaccctgtctctactaaaaatacaaaattagccaggcgtggtggcgcgtgcctgtaatcccagctactcaggaggctgaggcaaaagaatcacttgaacctgggaggcagaggcagcagtgagctgagattgcgccattgcactccagcctggccaaaaaatgtgaaactccgtctaaaaaaaaaaaaaatccaatctttcctattggctttattaaatacactttaactttagaagcttagaagcacaataattagaactggcctaactttaaaaaaaattttcacaaagaaattagtaacttgtagggtcatttgtaatctttttctctgttgatttttacagttttaaaaagttaatacaataatttatttacttattttttgagacggagtctcgctcttgttgcccaggctggagtacagtggcaccatctcgggtcattacaacctccacctcccgggttcaagcgattctcctgcctcagcctcccaagtagctgagattataggcactggccaccatgcccagctaattgttttgtatttttagtagcgatggggtttcaccatattggccagtctgatcttgaactcctgacctcaggtgatccgcccacctcggcctcccaaagtgctgggattacaggcatgagcccaatattttaaaaatagtacattattacagaagctagatgtgcactttaaattattatcagaaaattagtatgacagacaaattctatgattgtcccatcatctgggcctgtgacattcacacctttgtgatgttcatccccgactgtgggtgggacctgggacttgcttctgtcaaaacaatatggcaaagcatgagaggatgtcacttgtgatcatattagatagcagccaaaatggattaaagacttaaatggggccgggcgcagtggctcacccctgtaatcctagcactttgggaggttgatggcggcggatcacctaaggtcaggagtttcagaccagcctggacaatatggtgaaaccctatctctactaaaaatacaaaaataaccagatgtagtggcggacgcctgtagtcccatctgctagggaggccgacgcaggagaattgcttgaacctgggaggcggaggttgcagtgagctgagatggcgccattgcactcaagcctaggtgtcgcagcaagactcggtctttaaaaaaaaaaaaaaggtaatcatacctcactgcagccttgaactcctgggcggggttcaagcagtcttcctacctaaacctcccaagtagctaagactgtaggtgcacgccaccatgcctggctaagttttgcttttttttttttttttaagagactgagtctcattgtgttgcccaggctagtcttgaactcccggcctcaagcagtcctcccaccttgtctacccaaggactgggattaaaggcataaaccactgcacctggcccagtctcctttttgttacaacttcctccagctctgttttgctctggtgtgagacatgagcatggttcattaagaggcttggcccccccagccccaggaaagaacaagccaacaaccgataggaatgtagtactgtttttagtcctttcctcaggactggtttgtctgcataagatgagtaactacctgcttccaggtgagaagaagacatttaattttagagtagtccagccaggaagctgagatgtcattcttatcaaatccgcagtttcttcagaagacttgaggcctggctgagattctgtagtcccaaattggagcagtcttgagacatccaagattcttcggttctcattttagacttgccgtctctctcacaaagacccactgttttctctcacaggcaggcccccgccacttaaacgtgctgtgcgacgtgtctgggaaaggccccgtcactgcctgtgactttgacctccgcagcctgcagcctgacaagcggctagaaaacctcctgcagcaagtgagtgccgaggactttgagaagcagaacgaggaggcccggaggaccaataggcaggccgagctctttgccctttacccatcagtggacgaggtgggtgccactgtttccatactggagaatctcagtgaagactctgagagtcatgtggacaattgtgttgttcattattactatatagcagcccatggtgtcagggctcacttgtatgatttctggggcctcgtttttcactcaggcaagcctgtgtgtcatagcagagccattattgattatcacacagatgggattctgataataataacaactggaattttcatagcactttacaaaatatgttcactaagagcatctcatttaatccccaaatgtttcaagggtctacatgtagtaatcacacccagcaagtcaaaccatcctattatttgaggggatgtgtggtcactaatccattgagacatacattacttaaactttgatgttctttagtgctttgttactttctttttaatggtctctatgagcaaccagagagacctgctttgaaaacatttcaggctaggataatcacagcccatgctcccaatgtatagaactttgggatcttgattgtttacttcttcatttattggagctgactgacaacaataggataatgtagactttgcctgtggtcactgcctgaggcactttggatgaaatgagaggtgacgattattcaagccttttgtctgtttgaactccttatactgtataggaggctctcagttttcccctctgcgtgaggttatctacacttctgggtcttgccagaacagattactgctatatctctgctgtccaaatggtattgaaagttcagttggaagaaacaggatttgaggaaactgcataaaagatattctatccatccatgcctctaaatatttgaaattcgatccttggattaagtgagacaatcagagagcctgatacccccacccttctggattgtgtttgctaacctgcccttcagtgagctcacgactggtcagcaaggaggacaataaaggaaacagcagtcatgagataggatatcacgtccacatggaaatactattgttgacattgacctactcaccatctagcaccttcctctttgatgatctaaagggcaattagccttcacatcttccgagaaagaagaagcacgcttctgctgagataatacaaacacttagagattgtgctcattttgtaactaactctcttaagttctttacttagagcaaacttctgtccaccttcaccaaatgtggcaacttaatgattggggtcctgaatttactccagctttcttttcttttcttatcctgattttctaagcaccttggtttcctcatctatttttattttatttgcagtttttgtcagcagcctcaaatggtcttctgaatgaggcagaatataaaaataaattatctcacttatatatagaatctaaaaaagtggatctcatagaaacagagtagaaaggtggttatagcaggggctgtggggagagggagaaggtgttggtcaaaggccacaaagtctcaggcgggaggaatacgttttagtgacctatcgcactgcacagtgaccagagttaataataatgtgttacatatttcaaaactgctttaaaaaaggatttttaatgttctcatcacacacacacaaaaggtaagttggtgaggtgatagatatgttaattagcttgatttaatctttctacaatgtatgcatagatcaaaacattacttgatttaatctttatacgatgtatacatagatcaaaacatgacactgtaccccatagatgttcacaattactacttgtcaattaaaaaataaattaataaagtatgaataatgtgagcaatatcatcatctcctttcctcagattaaaaagcaacaattaggctaaagagctttttcaagattcaacagataaattaaattacaaaatggggccctaacccgctaactacaaagttcgtgttcccttgtttatgtatctacatacatatgactacctggtatgttgggacacataactgaaatccaaatatgatatttttaaatatcatgtaactttttagtttccatccacgacattaagactttttaccagatttgtcaaaacatattaaatcagactgatttggcctttactttccttcctcttcctctcagttctgtgatggagatgccaacatgtaatagagggacccaaagtggatgccagaagagagagaacaattaaaggatgcagagaatatgtccagtgagacgtttgcttgtcagtgtctccctggtggtattagaggggagaatgttccatctgaacagattaaaataatgaaacgtagcctggttttagaggaactttgttttatgatctttgaaacaatgcagacgctccattgggactgaatgttataatctgggagcaggcctaatggggcctgcttttattgagtagagagaagtgcttcgtaattagtgttgcagttatttgtaaactggcgtgtctaaaatgcttgagggcctctataccagccctttaatattttgaagctgttgtcacagaaattgcatttgtatttataatttgtgctttctccaaagaaagttctatggaagaaaggtaaatttctgcctactctgacatgattacaaatgctggttttttcgatgacacaatcagatttttaaatatatcattacttgatttccctgtaaggaaagttagaagagaggtaaactagtatatccaagttatggctgagtctacaggagaagcaaaagttggacttaaccaccaagcttctataaggcaagttctttccctaattcattctgagtctacaaaaggcggttattctacaaaaggcattctatgtcaatccctaagaaagattccactgatactccaaattatagaaaagtttgctgaggctgttggttacaagtgacagaacccaactaaaaccaattcagaaaaaaaggctaggggagtacttcttggctcacctaagaaaatcacaggtaggcaaatgtggagttgacctctggatccattgggagagtaaatgaaagaatatcatctctctcatactgtctctttctctctcattatctctttcattccgttcatttatatatatttttaggatgatgaaaacaagaggtatccattaatgtttcacatttccactttctgtttgcttgggaattagttgccatttcagttagctataaagcctgaggaaattcatatagcttagaagagactgaggaaatatatcacccaaatgtcatatgtggaccttgtttggatcttgatttaacaaaataacagtaaaaacaaattgagacagtcagggaaatttgaaactgacaaaaattatttagtggcaataagaaattattaatttttaggcataatggtattgctgtatgtttttaaaagtctttatcttttaaagatatgtactgaaatatttatatatgtatatggtctctgggaagttgcttctatgtaatccagtattgagcgagaaaggtggtaagtgggtaaatagatgaaaccagaatgcccctgaattgaacttgttgaagctagatgatgggtgaatggttcttcattgcattgctctctcaacttttgtgtatgtttaaaattttcccaatgaaaatcttttttaaaaggatttcaaaaattagaatctagaccaaaggcagtcccagaaatccatgagtgtctctaccttcaggttgttttccagttagggagatcttccctttagatatgtctgttccaatgatcctaaaaggtccagattgccctgagcgagtaggcatcaaaacaatgtctcctctgaaataaactcagccattccacccagcaacatggccaaccgccgtaaccacaaggaatggggaccacagggagaggttggagtaatgatgagcttaccacattgatcattccatcaaagtgggtacatatttaccaggaaggtgactttactgctatttgcaagaatgttaagcttgctgtggggtattcactggaaagctcccaggaaaagacagtgagatgtgaccctgttctttggacccttgcgatgggcagagcactcaccagtgtttggaaagcatactgcaagagtgggaattactgttttcaaggatttgcactacttatttttgcatacatgaatataattaacatagaatgatagttcagatacagatgttaaggttacaataggggcttgatatttctctttaagtgtttagtttctgtgcggtaaaataaacaggtagagctcttaatttgtcattactaaatttcatatacctagcactttaggaagctctaactgcataagcctgtctagaacttgtcaattcaaccccaagtctctatcatctgtttaagaaaacagtgaactgagaaagtgactctgtattataggatcaatggtttacagccttaagtgaaccattctgactcagatttcaaatctgaaactcacatacttactagtaaagcccttgacaggagaaatattgcaaatgtgtaattagagtgggcaaaaaacacacaaaaacatcaacaataggtataagattttgcaatgccatctggtggatgttactaagccatatccatgttcacatttccttccttcctgcttcagtctctttgtcttgaatgcttgggtttctaaaaggagaaactgttttgctgcaaatgctggctttgaggttgggggttggaagagaaactttcttataaaaggcagagtgttagaaaaaaagcaaatctaagttaacttgagccgtggagggtagccttcccttccctgggttaactctaattggagctccccacagaattcactaatgatttccttacgatgtgattaaaaataggaggatgctgtggaaatacgtccagtaccagaatgtcccaaggaacacctgggcaacagaatattggtcaagttgctgaccttgaagtaagtatcaacaaacacactgccaccgctttgagatttatcttgccttttacatacaaatgttgtgtttattatcagagcttgaatcaaagcggagctcccaaaatacgtctaacagtgggcagctgtggagtagtagaaagggcacgtttgagtccattcctggattttttttctaccaacttcttgatggtcattcttctacaatagagaaggcaaacacacgtgtctactaaagttaggcaggtaaggtcattgagtgaaatgacctacattaagaaaaatagcgcttaagtcagtggtgtgctggagtcgactgtactaactcgtgagatctgacagtgcatatctcttcctgggttcggtgaagtcacattggtaactttaaattggccatggcgaaagtatttacaatgtagaaatcagccaatgctacacgtttgcaccaccctcagcacccggagattatttgtaaaacatttaccagtatgccactgttgaaacacaatgataaatgcaactgaaactcagtgccaggggacaatagggagtggtgaggactgtagtaaactatgttaagggggcactcactgctagcaacagactcttgccatccaaataaacaggcccatttttgtcaactgtcttttctattttttcaagagaagctgaaaacccagatttttctgcataatataccgactccctaaatatgttctcattccctttataaacaccatataattaaaacacgactacagtctggtttcatcttgtgggccaattatttgccacatctacttcaaagtagttgcatccaaacgtttcaattgtatactatgatagcaaaaaaaaaaaatcctctatagacatgtattaattttgtactttcatattaaaatattatctacattataaaacataatagaaattttaaagatgaactagataaatctatataaattctagtattttcttcttccactgcaatagattgtcttgtgtaccctcggagtgcctccatacctctcttcgtctctgcagactgctattttcaagaattagttctccttcaaatccacagatgaaaactttaaagttgtacatattttacctaagcaaaactacagaagcgtaacatttatttatatactattagatgggtcatccatctctcaaagtcacttcataggtcccttcagcggcccctggtttgcagtgagaaggcatctggattctggatgtaaggctgggtttcaacccctgggaacttccctgggattttgagttcttccctataaatgaagttgatagaccttatggtctcaaaattcctacctaccacaaacttctatgattctaacgcatagcctctgccaacttcttctgcctcagaaaacaagccagcaagtctgctcacacagctatgggtggtctcttgatattatagtctcctcccgctggccagttctaccagagggtcttcagggccttttgtacggagaaatgagcagcccataaaccagctgagtgtcaagtaatgggcacagaaaagcaagctcttgcccttgcaaaccaacctggcagtgggagcttcctcatctgtctggttggcgggaggactgagtggaagtggctcttcccctctgcattgtttaggaagccttcgctattgtctgagggacacacctgccccgacaggatgcatcatcaggctacttttagatgcagcgactatgtcatttgagatggcagaaattctcctctatggtgctcatagccaagctttctagacctctccagtgaatgagaggcagctgttctcacaggtgggaaaacatggtcactaagagagatatgtgttattttaaaaaaatgttaatggaggccaagtgtggtgactcacacctgtaatcccaacactttgggaggccaaagtgggaggatcgcttgaggccaggagtttgaggccggcctgggcaatatagtgagaccccctctctaccaaaaactaacagatgtgttaatttttagccctagctacattgggaggctgaggtggaaggatcgcttgaggccaggagttcaaggctgcagtgagctatgatcatgccactgtattccagcctgagtgacagagtgagaccctgtctctaaaattaaaaaaagaggagtcacttgaatatctcttaatgaaaattgtaaagtgcagtttctagtgatgtccccgcaactgccaaagcagaaattaagtcgaattgacatatttgccaggtgcacttggcctgctcatgtgttttaaatagtatctatactaacctataactgcaagagaagagatagaccaaaaagacagccctccgagtaactacttagagtaaactagatgaaagaaagaaacaaattcttataggtaagcctagaatgtgacagtatgaatagtaaaaatataagggtaatattaatggcaaatgttttcccatttacattgatatgtaggattctattcataatactacatgttttagcccctgaggaatttgtttaaagttgtagacatctgtaactgtctctgtattgcttttcagaaatatagaaaccctcaaagatacagagagaattagggtcctgccaattctgcaaatgtttgtaacagaaaaaaaaaaaaagaatgacaacaaagtatttttctgttttgtgttttaaatggagaaatattttaagatttaataccatcttatgaaaagtaatctcagctcttaggagtcttcttgatggtgaaactttaatgtgcagaaaatttgcccaggcagtttcttttaaatgcagattttggaggaccttccataacaatctccctcaagagattctggttgagtaggtctcaggtgggatcaagaaacctgcatgctggctaacttcttttgcttcaaaatgctagattctggggactacacttaaagaacaaacactcacggaaaaagcccaggttctgtgatcagagatggctgggctcaaaacctgaccgaacactcacggaaaaagcccaggttctgtgatcagagatggctgggctcaaaacctgaccgaacactcacggaaaaagcccaggttctgtgatcagagatggctgggctcaaaaccggaccgaacactcacggaaaaagcccaggttctgtgatcagagatggctgggctcaaaacctgaccgaacactcacggaaaaagcccaggttctgtgatcagagatggctgggctcaaaacctgaccgaacactcacggaaaaagcccaggttctgtgatcagagatggctgggctcaaaacctgaccgaacactcacggaaaaagcccaggttctgtgaccagagatggctgggctcaaaacctgaccgaacactcacggaaaaagcccaggttctgtgatcagagatggctgggctcaaaacctgaccgaacactcacggaaaaagcccaggttctgtgatcagagatggctgggctcaaaacctgaccgaacactcacggaaaaagcccaggttctgtgaccagagatggctgggctcaaaacctgaccgaacactcacggaaaaagcccaggttctgtgaccagagatggctgggctcaaaacctgaccgaacactcacggaaaaagcccaggttctgtgaccagagatggctgggctcaaaacctgaccgaacactcacggaaaaagcccaggttctgtgatcagagatggctgggctcaaaacctgaccgaacactcacggaaaaagcccaggttctgtgaccagagatggctgggctcaaaacctgaccgaacactcacggaaaaagcccaggttctgtgaccagagatggctgggctcaaaacctgaccgaacactcacggaaaaagcccaggttctgtgaccagagatggctgggctcaaaacctgaccgaacactcacggaaaaagcccaggttctgtgatcagagatggctgggctcaaaacctgaccgaacactcacggaaaaagcccaggttctgtgatcagagatggctgggctcaaaacctgaccgaacactcacggaaaaagcccaggttctgtgatcagagatggctgggctcaaaacctgaccgaacactcacggaaaaagcccaggttctgtgatcagagatggctgggctcaaaacctgaccgaacactcacggaaaaagcccaggttctgtgatcagagatggctgggctcaaaacctgaccgaacactcacggaaaaagcccaggttctgtgaccagagatggctgggctcaaaacctgaccgaacactcacggaaaaagcccaggttctgtgaccagagatggctgggctcaaaacctgaccgaacactcacggaaaaagcccaggttctgtgatcagagatggctgggctcaaaacctgaccgaacactcacggaaaaagcccaggttctgtgatcagagatggctgggctcaaaacctgaccgaacactcacggaaaaagcccaggttctgtgatcagagatggctgggctcaaaacctgaccgaacactcacggaaaaagcccaggttctgtgatcagagatggctgggctcaaaacctgaccgaacactcacggaaaaagcccaggttctgtgaccagagatggctgggctcaaaacctgaccgaacactcacggaaaaagcccaggttctgtgatcagagatggctgggctcaaaacctgaccgaacactcacggaaaaagcccaggttctgtgatcagagatggctgggctcaaaacctgaccgaacactcacggaaaaagcccaggttctgtgatcagagatggctgggctcaaaacctgaccgaacactcacggaaaaagcccaggttctgtgatcagagatggctgggctcaaaacctgaccgaacactcacggaaaaagcccaggttctgtgatcagagatggctgggctcaaaacctgaccgaacactcacggaaaaagcccaggttctgtgaccagagatggctgggctcaaaacctgaccgaacactcacggaaaaagcccaggttctgtgaccagagatggctgggctcaaaacctgaccgaacactcacggaaaaagcccaggttctgtgaccagagatggctgggctcaaaacctgaccgaacactcacggaaaaagcccaggttctgtgatcagagatggctgggctcaaaacctgaccgaacactcacggaaaaagcccaggttctgtgatcagagatggctgggctcaaaacctgaccgaacactcacggaaaaagcccaggttctgtgatcagagatggctgggctcaaaacctgaccgtgccagtccctaactgtgtagactttggcaagttccttattccctgggaaccttgctttcctggtgtgttaaatgcagataatatctgcattacgctgtagttgtgtaaagagactgatgtgtggaaagcacttattataacacaattttaagtctttaataaatgtcaattctctttttctttctcggaaccacagaggacttactactcagtaccaacctaagtatatcacagcaatattcaggccctttgtgtagtagggagtaaacaattaaatatagattgagcatgccaggcagcagctggtgagcctaggcccaggaaagcctccaattggcctggtgcagtggctcacacctgtaatcccagtactttgggaggctgaggcaggtgagtcacctgagctcaggagtttgagaccagcctggacaacatggtaagaccccatctctactaaatatacaaaaattagctgggtgtggtggcacatgcctgtagtcacagctgctagggaggctgaggccgaagaatcgcttgaacctgggtggcggaggttgcagtgagccgaggttgcaccattgcactccaccctgggtgacaagagcaaaactccatctcaaaaaaaaaaaaaaagaaagcccccaattaatgtgcaattacctaataatagaaagaataatcatagaaatcctcaacactgggcttttcggtggtaaaatgtatgtaacataaaatctaccatctttttttttttttttttttttttgagacagagtctcactctattgtccaggctggagtgcagtggcatgatctcggctcactgcaacttctgcctcccaggttcaagtgattctcctgcctcagcctcccgagtagctgggattacaggcacttgccaccacgctcggccagtttttgtggtttagtagagacagggtttcaccgtgttggccaggctggtcttgaactcctgacctcatgatccgcttgcctcggcctcccaaagtgctgggattacaggcatgagccactgcgcctggccaaaatctaccatcttaaccatttttaaggtacagttcagtggtgagtacattcacattgttctgcaaccatcaccaccatccatctccaggaatttttctcttcccaaactgaaactctgtacccgttaaacaataactccttattctccctactccccagcccctggcaactcccattctactttctgcctctatgaattttactactctaggtgcctcatgtaaggggaatcatgaagtaactgtctttttgtgactggcttcttttactcataatgtcctcaggttcatctatattgtagtatgtatcagaatctccctccttttatggctaaataatattccattgtatatatgtagcatattttgttatggcctcatatatgtatctgttcatggacaagtgggttacttccaccttttggctattgtgaatagtgctgctacttggcattgtttttaagatacattcacacacatcattatacgtgatcctcacaacaaccaggaaaatggaaaggcaagcatccttaccttattttgcagataaataaatggaattcagaaaggcgagtaacctgattagggtcgcagaattagcagatggtggaggaggaacagagtccaggtctctgcctgggtgccctgggagtctgccatgattccaaattgcctcatttccaaaggcgccatttgagcaaataaccctttttgtctgtgctcatattctgtccaaatattcttctaaaaagtcctcttttgagacaaagctatccattgatgaggacatcctctcacacatacctggagacaaaacatgactttattgacatgatgtctgaggtaatggtggactggggcccttttcctggtgctctctgcaggtaacatccaaagccatgggacatcaagctgagaaacttggaagaccttcaccagtgttccatgtgcacctgtaatgtccaccaagatactaaaggcaaataatgcaccaggattatgctttgggattcaccgtttcgaggggaattggcaattagggccaatatgagggctcatctttctagctctcatggggcccaggcacctcagtgtttatctgctgtgctcaagcccctccctgacctcaactcagcaactccccagtaatggagttaggaagggccagacattcatccccatcaaaacccagccttcttctgactgtcccactacaaatctaaggaaaagcaattgaacttttcttttgttgccatctgaaaagccccattccttagaattgaataatacagattctatcctttaaatttttttatttcaatggctttagggtaagtggtttttggttacatggatgaattgtatagtagtaaagtttgagattttagtgcacccgtcacccaagcagtgtacattgtacccagtatgtagtttttttatccctcatccccctctactctcctgcttctgagtctccaaggtccattataccactctgtttgcctttgtgtactcatagcttagctcccactaacatacagcatttggtttccattcctgagttacttcactcagaataacaacccccggctccatccaagttcctgcaaaagacattaattatttccttctattttatggataagcagtattccatagtgtatagataccacattttctttatctactcattggttggtgggcaattaggttggttgttggttccatatctttgcagttgtgaaacagatactatctagcaataaaatgtgaaatgtgaacaagtccattacctcagacagaaagtctaccctctgaaaacacagtagttacaataagaaggtgaatcacactaaaggtccattcagcccactctctcttgcagtgagtgagtgaatgagtgagatattccaaaaatatccaccatgcttttgtaatgtccaccatgatctcaaatgattaggaatttttcacaaacctcctatatttctctattaatatcccagtgcgattctcatatacttggagttttccaaatatttcgggaaactgctcatatttttaaccagtttatctatctaggtgttttcagaaaattcaaaattatctaactcaaagccacatagattttcctctctttctatggtaggttcgagattgaaattgagcccctgtttgccagcattgccctctacgatgttaaagaaaggaaaaaggtaagaaagcaaagaaaaatccatccctaaggcacatatattgttcatgattctttgcatgtatgtttttaaatttctttgcagcaagaacctatcagatttgaaagcaaatgatctttgatgagtccagttctgttgcctttgcaatttttcaagcagtggtctgagaatgtaatttatgatctttgaagaattttagagggagaggctactggaggtgctggcctggttggaatagagaaagaatgaaatagcgcatggggttatgtataaaacaaacccatttaaatacatttttaacaagcttggatgcgcatgtaaagcttcctcagtttgagagttctttgcactgtgaaataggctcatgactgaagggcatcttacatggtagaggtctcaatttgtcacagagttcagaccttaccaactgtaatgtgcttttaatgaaaacagtgaccaagacctctcgtgtgtttttaatgtttagtcattttgtgactcctagaagaggacagcaatagcaaatccagagtaggatggacacttctgcccttctttacccataatcattctgtatttaaggaaacaagcatctcctgcataaatattaataatcactgagatttgtaggataggttaactgctaaaacaagcagaacccaatctcagtggtttaaagcagtagttctcaaacttgagcatgcatcacaatctcctggaggacttgttaaaacacagattgctggacctcacccacagagtttctgattcagcaagtccaggtggggcctgagaatttgcatttctaacagtcccctgctgatgctgaagctactggtcaggggaccacattttgaaaaccgctggcctataagcaagaagttgctgtctttgtttctttaaccatccagggtgggaggagggacccctctgttccacgcagccactcagaaatacaggctggcagtggctcctccatcttcagtatgttctctccccaaattactcttgtcactgccattgctgcccctgaagaagagaaaagaaggatggaggaggcctggaagtttgatacattgcttctgctaacaattcactggagagaattgagtcacatgatcacccctcattgcaaaggaggctggtaaatgtagtctctgcctgggcagccactcaccactaaaattctcatggtgatgaaggagagaacccaaccatacagtggctcttaagtaatacgacactaagagagccaggagcactgttcacatcatgctcttgctcagaatcttcactaagattcattccctacaaccaggctttcttcatgatggcattcctctaccttctttccatccatagtctatgcagagtcaagctagaccgctgactaagcttcccccagccgttcaagcctctgagatatttattcatactctaatctctccctggcacatcatcaccttccacccctgcctatcagaatcttctaaggcccatccatctccagtgctgcttccatgaaaagttgtccttgtcacccaactgcaaatggcctgtcactctggaacttccacagtgcttctttgtatgcatgtggtgacttgtattttgcttttactgtagttagttacatgtttaccttttccctcacctttttttttttttttttttgagtcagggtctcactctgttgcccaggctggcatgcagtggggcgatcttggcttactgcaccctctgcctcccgggttcaagtgatccatcctcccacctcagcgtcccaagtcgctggaaccacaggcacatgccaccatgctggctagtttttgtattttttgtagaggcagggtttcaccatgttgcccaggctggtttcaaactcgtgagctcaagcaatgtgcccgccttggcctcccaaagtgctgggattacgagtgtgaaccaccacacccagtccttccctcattcttgattgtgaattaattgagagcagaggtcctcctcttctgtagtgaagtaactgatactcaggaaataccggtgggttaataaacatttaaatgtttcaaggaacatctctcaaatggctccagaatacctagacattgtgacaaaacatttgtcagatttatccaggagccactttcctaaaccacatctgtgattattacacttactccttcagcaaaatttctctgtggtgtttttactcctttttaacatgtttaaaccatgaatgcaacaggtctaacttatatttcactttgctgctcatttacagatctcagaaaattttcactgtgacctgaactctgaccagttcaaaggatttctgcgagctcacacgccttcagtggccgcatcaagtcaggcgagatctgcagtcttctcagtcacctacccgtcctcagacatctacctggtagtcaaggtaattcagtacgatctgatttgcccaatctgatgttttcattgctgtgttgttcccagcacatgtttggggtgcacgcaatctcagaatgtgtccacatatcctctgagattcactttgtttccttctcagtttaccccttttccgttctaagtaaactgtttcagatactagaaagactaggttttggagacacacagacctaggtttgagtcctggctttacaacctagtaattaaatggcattggcagtttcctggtctttctgagactgagtttcctcatctgtgaagtggagataatcacactgacctcagtggatagtcatgactacagaataaagcttggcacatcttgggcacccttctcctaattaaggagagttccctcagtgacctggtgcaaagaagctgctgtggagaaaggaacaaaatctctgggctagagtttcctaacgatgttcatgttgctctagagatgcatagttacgtgttcccaagtccagcctcttacaagctgaagcgtgggctgtggttttcaagtttcatcctccttttttttttttcttcttaccatgtcacagactgtctctaatgagagttgaaatctatggggcaattgtaagtagaagagcctttcattctaggctatactctttgctgttgtaagaaaaccagatcctttctctgtacaccaaaatgactggttagaaattaacaaacatcaggtattttacctaccttaggccagataattggtcttattgattcttttttttttttttttttttttttttgagaggagttttgctcttgtcacccaggctggagtgcagtgtcaccatgtcggctcactgcaacctccacctcccgggttcaaacgattctcctgcctcagcctcccgagtagctgggattataggagcccaccaccccaaaccaggctaatttttgtatttttagtagggacaggatttcaccatgttggccaggctgatctcaaactcctgatctcaggtgattcacctgtatttggttcccaaagtgttgggattacaggcgtgagccactgtgcccggccgtaaaatcattgtaaaaacaaaacaacaaattcaggtgtctgatttcatgtgcccccagcctcttaggtttggaacattatctagttagtacagtgttttatgtctgtagtctcagtgatcgccccatgatctcatggattccaaataattcaggtagctttgaggtcacttaacagatggcaaatgtcttttcactctagcttctttaacaccatataacaaagattatgagaggttactgtagcttgaggggaacttatttaagcttatagaagtatagttaaaattatattgctgaaaagacacttctattgttgtcaaacttcaatgtgtctccttttcgttgcaatattacttagacatacaggaaaattaaagcccactatgatagccctgtaggtaagttcacaattctctgtcagcctaggaaactgaagaagccaacactagttctatagagccaaattttatctcaaactctacttcccagtggatgactttctcttgattaatccgtcatattctgccaagtaacagtggttacccattggttcctatcacttactaaatatgttccaaaattttcaaatgtataaatgtgttcatttggcataacaaacatactaaagtgtttggataggtttaagaaattgaaatctactcagcaagacagcccctggttggctttctgtttgcttttctttatcgtaatgccatcattgttgcttctttccctttaaatatatagtaaatggtgttaaactatttagcacatccaggcagacattatttggtaagaggggcttctttcttttttgtttatattcccaggccgaacatcagggtctttactgtattttaggtagcatcatctagttcaggtgttgcatataatacggctttaagggattatttccgcttaaaagtttaattcaagattttgtgaaatttttttttaaaaagaatttgttttacaatcaaggaaagaagagtgaaaatgggattgaattggaaacttttcaaaaattgtttaaaaattggtatgccgtgcccaatttaaatatttcataagttgcgatgggcctatccttatgtaagggccacatagtttgagaaaacacaaagcagagagcctagcactttagaagtcttgcagatgttaaatttcccatcttaaagagtttacaatccagttaaaaaaacaacttggcattcaaagaaatgggttcaaattcctattttgctacatttgctgtgtatggtagcaagtttagtctgtcagtctaattggacaatgatccctgtgcctgagtggttttgaagaaaattgaaataatgtatgtaaaaacacctaccctgtacctgacataccataattaggtaaacaataaatggccatgaaatatgaaaaaaataggtatgccaagtgttaatcctaccccttctgaatagagcagaaagtagtctgttcccttaagaaaagttttaggttaatctgataggcttatttgccctactttccatggttatgaggagtcatgcatttcattacacacttttgcataaatcatgagggaacaaacaataggttctcatgtcggtctgcagctccttctcatgaagtacctggagttctccttgcccactgcagccagggcatagtatctgctggtctggtcaaatctgacttctcctgcttcctgtatgttccatgatacacactactagtgcatgaagccgtggcattccccttccttgcttcagggtcctaattaagaagttcttcatctctgttcagaatttattctaaagaccacatttttaatccattcacttcatggaaaaattagcttccttccaatttgttctacaagctcctgactatgagcttcaggagaatgggggcagtgtttatcgccaccttatctcccagctgctaccatatagaaggtactcaacaataagtaaacgattgctgattagcaggaatactggtcagtttctagctcaagtgttacgtgcttatgttttcagtgtggtgcatctctcagtgggattcgccttctcttcatgctgtggcaatgggagggggttttgaacttctttgatgagaagagagacttcctgcttggagtcctccctgaagcagatattcattgagtagcctcatgctgcttcctttgaaaccccataaatgcccctttatcatgggtattgttaaatactttgtgcctaactcacagcacctattaagtatgtgtcccttttgtactgtgttgacccaaattctttcttcaaggatcatctcaactgatgggactaaatccactggttttactcttcaacatctaagttaaattttttttgagcagagagttaggaaatttcaaatttctccttgtctttcttttaaatatggtgcccaaatttatgacaactggccagccagtcactttacctgaagcaagacagaagacacttcattcattcttattaccagcattcattcctatcaacagccagttagcaaagcaagaagctgcacatcccaatgcttttgagtttctttccaagtctgttaaatccagagaattagccctgataggaattacaagggagacaattacagataatttattcggttcagtcattcattttgtggaaggttttagtccctaacccaactttcacagagaccatatctcttttttacattgtaagcaataataaagaaaatgagttttccacttcctacgtatgtctcctgggttttgttttataaaataacttttattgctgtttttattatatacataatacatgtttattgtttaaaatagaaaatacacataagcaatgggaagaaaataaaaatcacacataatcccaccatagaaagttaactactattaacacttgctgcatttgctgagtatctactgtcacccttttaatatgcctttatgatttgttaaataaaattgtatgctattctttatataaattttttaataaaaaaatatgtatcacagatagcttcctatgtcatcaaatattgtcataaaatgtaattttgatggttgcatagattcctttttatggatgtaatttatgtgccttattttaatattctttttattggtagattgaaaaagtcctgcagcagggagagattggagactgtgcagagccctacacggttatcaaagaaagtgatggtggaaaggtatggtaatttgagtgttgttaaatggagacatcttagaagaagcaggtattttcagaagtgttacacaaatagttaatgggctttagtccctaatgtgtccctatataagacactactacattttaattaaataaaagaggaaaagaaaactggtcaccgatgatgactttttttttttttttttttttttttttgaggcagtgtcttactttatctcccaggctggagtgctggagtgcaatcacggccccctacaaccttgaactcctgggcttgaatgatcctcccccttcagcctcttgagcagctggtactacaggcacatgccaccatgcttggctagttttttatttttttttagagatggggtctcactgtgttgcccaggctgctctcataattctggcctcaagtgattctcctgcctcagcctcccaaagtgttgggattacaggcatgagtcaccatgcccagcctgatgatgattttttagagaaataaatccttgaattttctaatgttgacatacagcaaggtctgactgcataacttgattggggcaaggccaccccctgttgtcttcattctgaggctctgactcagctggttgggaggtccgtggagaccccaaaactaaacagtgccagagctctcctggccttcctcaacagcatgggccgctgccctttcaggtatgcaaataactgggaattggctgccactaccatgcattatatatattcattagcacagcataggtgttgagcctatgaaaaggatatcttttctcaacagcaatttgcaaagattcccagtgtgatttttaaaacatggccttggccgggcgtggtggctcacacctgtaatcccagcactttgggaggccaaggcgggcagatcatgaggtcagaagattgagaccatcctggccaacacggtgaaaccccgtctctgctaaaaatacaaaaaattagccgggcatggtggcacgtgcctgtattcccagcttctcaggaggctgaggcaggagaatagcttgaacctgggaggcggaggttgcagtgagccgagatcgtgccactgcactccagcctgggtgacagagtgagactctgtctcaaaaaaaaaaaaaaatagcctttctggaataagacttaccttattagtattgtactctacagactcataaatgtcaagtaagatttattgaactcaaggcattttttttttaaaatctgtcttttattctgaactcagaaagaacaccttggaagtattgtaaacttcctaaggagttgttaggaagctttttagaattttttggagttttccaaggtgacttttggagaaacaggttcacttgggagcttggtagatgatatactaaacttgatttcaagattcttttatgcaaatccaagtcacatagctagccaccaaaagaattgataatctgatgtaatgagtctctttttgttttcgttagctaaaaatgtattttactaattaaatgtagcctttttgtaaactcctcgttttttaatctttatttccttatcagctagacccaagtgcatcatttttctgcctattcactgtttttattttttagtgggaagatatgtttttactctttttaatcagtagggtttggattttggagatggctgtcatattcaggtcagaggcagttgacttggtgctgatgcttgtttcagcttgtttctttccattttcctccagagtaaagaaaagattgaaaaactaaaactccaagctgaatccttctgccagcgtttggggaaataccggatgccctttgcctgggcacccataagcttatcaagcttcttcaatgtctccacccttgagagggaggtaactgatgtggactctgtggttggtaagattttcacctgcagtgggaaagggagggctccccagtgtgcgctgcccaggtccacagcttactagcggggactgggggcacagtgaggtgtgggaagtggggaggcagaaggagataaatagaatgaaacactgttatgactggattacgtagatttggacggtgatctccaaaagaaattatcacgaacattggtgaagattaagtatactcttatagtaagattttctagatggtatgacactttaaaaagctgatttttgctagccacccgctctcaaaagtaaaactttaacaagaaaatgtagtaaccatctgtagtgtgttaagcagagacaccatggtcgactcctaaacctaaaaaaaaaagcctctgttacaaaggcttcaaaaagcaaaactcaacaggaacagggcgtggtggctcacgcttgtaatcccaccactttgggaggccgaggtaggcggatcgcttgaagccaggagttcgagaccagcctggccaacatggtaaaaccctgtctctactaaaaatacaaaaaatttgctgggtgtggtggtacacgtctgtaatctcagctactcgggaggcagaggcaggagaatcgcttgaaccagggaggcgaggttacagtgagccgagatcaggcctctgcactccagcctgggcaacagagcatgactttgtctcaaaaaaaaagaaaaaagagaaaaactcaagtttcccagcaaaatttccagttcgttaaagtttactttgccaagtgcaatgaaaaaatgggcatccaaagaatatttactgttttagtttatttagcatatttctttttcgtcatctcacccgtgatctgaatcattcattcctacactgcttggtgtagaaattttcaaaagggttgcaaattttcaagtagacctgcccatatcacctgtggtggggtttctctttccctaaatgcttttgtatccaccaaatatagaagtccatgttcacatcttttcatgcattccttaagctaaggcttaagccacttctgaaatactaccttgagcagggaagtggaggaaagggcattttgtgattgctgctgctattttggagttactggtacataatcaccagtcagaactcctgggttatttctggttcgtcaataacaaacctcactttaccacatcctgatcttcctgccacagctttctttaatgccgtctatgtagacccaagtaacttattgataagagttatgtatagagcttagagggcacacaagctaggtaattcaggatagggcatgctgaggcctcaatcatctctaggtcaaggataacctgacaacagagactgattcttaaggagcaaccagaagatgcaaagatgtcatgtattatactgaggcagaatggcaagtttaggtgggtagaggtagcaagaaattctaattcaacatcatggtaagaattaaggataagaagatactcaaagacgggttggaactgctctagttctaagcaatttgattatttacaagagaacccatgagtttttgcaatataaaagcaacaagatctccacccaaatcccaaaaggggataagaaacaactgggcaaactatcagggtcccagcccaagtctgagtgtgatttggggttctaattcccattgggcagatcacccaaggcagaaactcagtcttgctgcctggtccacataatgagagcagaggaatgctgggattcagagtgtacacaggctgaccccagcatgtttgggtcacaatcacaaatgccttcaggggcatttgagtacatgcctctcccagtggaatgcaaatatagaaataaaagaaaagcaaacactgtgctgactaaataaagcttatcaggagaccctgttctggctatagctctggactcttgccgggtggcatttgggctaccctaatttccatgtgggaggggcccatggctgctcctggcctctctcctctggtcggaggaggattaaggacaccaacaggaggactaagaaaggtaggggccaatggaaggacattttcattcaaaacaaggatggccatattcagtgttcctgatcagtgactttaatcatacatattgtgaagttaataactgctgtgtgtttgaacagaaaggcatactttggagtgacaattgtttttcttaaagggagaagctcagtgggtgaacggaggacattggcccaatctagaaggctttctgaaagagccctctccttggaggaaaatggggttggatccaacttcaaaacctccactctgagcgttagcagctttttcaagcaggtatctcttcacattacagtgtgtctggatttttccccatactggcatgggcactggaacccacaggaggaggatacgtagtgattaagagagcaaattagttaagctcactctcttagttcattttctgctgcttataatagagtatctgaaactgggtaatttaaaaagaaaagggatttgtttctttcagttttgaaggctgaaaaatccaaagttgagggcccacccttggtgagggctttcttgctggcggggcctctctgtagagtcctgaggtggagcacggtgagcagctgagcatgctagctcaggtctctcttcctgttcttataaagccaccagttcccctcccatgatgcagattaatccattaatctgtgaatggattaatccagtcatgagggcagagtcctcatgattcaatcacgtcttaaaggctccacttcccaacactgccaccatggggaccaagcttcaccatgagttttgaaggggacattcaaaccacagcattcacaaagcctcaatttcattagccagaaaacgggaacaatagtacttaacttcatgtggctagcaggaaggtcaggtgacatgagacctgtcaagctcttcttagagtgcctggaatacagtaagtgctcaatgaatgttagctattttaactgagagaagggttaggttttgttccttgtgataccaactatcctatttgaactatcttggccaatccattcattatgctatgacaacagtctggctgggccatctccttcccggtggatctcagggtttcttggcctggctattcatgtgcaagtttccactttcactactgcttgatgtgcaagtttccagggctccctgcttgctcagagagggtgaccattccagatggtactctttgttagctcagtaaacatcaagactatttaaaaaaataaaaaacttcctagacttgtcaacggtatagagacagaaagtagaatgacggttgccagggtctagggatagaggggtggggagtcactggttaaagggtacagagtttcagattttttttgcaagacaaaagcattctggaggttggttgcacaacaaagagaatgtgcttaacactactgaattgtgcacttagaaacaggtaagatgggccgggcgcagtggctcatgcctgtaatcccagcactgggaggccgaggcaggtggattatgtgaggtcaggagttcaagaccagcctggccaacatggtgaacccccgtctctactaaaaatacaaaagttagccgggtgtggtggtgcacacctgtaatcccagctacttgggaggctgaggctggagaattgtttgaacctgggaggtggaggttgcagtgagccgagattgccccactgcactccagcctgggtgacagagtgaggctccatctcagaaaagaaaaaaaaaaagaggtaatatggtaattttatgttagttatattttgccacacttaaaataaactcgcttggtctgactctgttttggaaagttttccatagctacgcagtcttcgtggagcatttaaaggggttacattaacaaactgaaatgcaaaagggatgctgagggcgcctgtgcaccgtgccacatcatagaaatagtaaaggtctgaaaaggtttctattcagcatacatgtacccttcccaatcttatgaccttggaggacaaggtacttaactaagtctggatggtctcactgggaataagacatatctacccacttaccttactgggttgttgtaaggattggagatcatgcatgtgtgctcctgacccatcttgggcatatgtgggggtggacagcatttatacttaaccttgttcgagacaaatgtgaagaaaatgagatggaaagatgctttctccaccttcgaacatttgaagaagaaagtaaacttattctgtattgttccggggggtaatactggcatcagagggtgagagttatcggggggaagcttttggcctggttttctaatggtcagacgggcttccttagaatgcagcagatgccccatccccagaaggactgataagaggccgaggcacagtgagtcacagtgattgagaaggatttaacaagaagtggagctcagtgatttcagagctgtctataatcctaatttctatgaaagacttgtgagaataaaacttaaaggtaaaaatcttcccagaaatcgtttgtccccaacccaagagtcaaaggtgcatctacattaactctgacttttctcttggcaggaaggagatcgccttagcgatgaagacttattcaagtttttagctgactacaaaagatcatcatccttacagagacgagtcaagtcaattccaggtgtgaatgacttatctttatcctctttagctgtgccaaaactgcttatcgttagacacagtctttgtctaatgccagaatttataaaatcatgtttgccaagtgaaatgtgagattttgtgttaggggttaagaatctgaattgttctatgtctttggcaaacctattaatgtttttttaattttcttaaaggattgatttagtaaacaaaccttgtgctttagatctggtttctcagataatgagataattgtttaaacagaggagcccctttaatcaaataaaatattatacttagtattaaaaaagtaaatgtgagatgctttggtagaaggcaaaggcatcttccttatcctcactcggcagccctggaggtacttctgtagcatcctcaggtccagggaagccagtttgtgtttgtttttgtttttttgagatggagtcttgctctgtcaccaggctggagtgcagtggcacaatctcagctcactgcaacctctgccttccaggttcaagtgattctcctgcctcaacctcccgagtagctgggactacaggtgcctgccaccacgcccagcttattttttgtatttttagtagagacagggtttcaccatgttggccaggattgtctcgatctcttgacctcgtgatccacctgcctcggcctcccagagtgctgagatgacaggcgtgagccaccacatccggctggaagccaattttaaaactcccaatttttactgctagcaatgcagggaagttacttaacaatgtaaaattatactgtggtaattcaggaaagaactttaaaaatcctctaatccattccttctcattttacaatttcttgctttatattttattttatagaggctaaatctcgaaagttatcatgacacacttttctcaagctgtaggaaattagctccaaaacttttttacagtactatagtttgttcttattttcatgaaagaaacacagtgcaacaatctttcttgattccctcataacatgacagtttctttactagaacattcctattttctctctttaggcttgctaagactggagatttctacagctccagagatcatcaattgctgtctgactcctgaaatgctgcccgtgaaaccctttcctgaaaaccggacacgcccgcacaaagagattttggaatttccaacacgagaagtatatgtccctcacactgtgtacaggtaagaaacacaggctcgggctgggcgtggtggcttacaccataatcccataactttgggaggccgaggcaggaggattgcttgagctcaggagtttgagaccagccttggcaacatggcaaaaccgtgtctctacaacatatacaaaatttagctgggcatggtggtgcatgcttgtaatcccagcaacttggcaggctgaggcaggagaatcgcttgaacccaggaggcagaggttgcagtgagccaagattgcactactgcactccagcctgggagacagaaccagactctgtctcaaaaaaaaaagaaaaaaagaaaagcaggttcttggaaaaccgttgagctcacattctgagttttatttgaataacgttttctcatccttcaacctgtcttcctacttcctaagtttcagggaaatgaaatgtgatatttatgtaaccgtaggtgattgccaaatctctttctaaacatagtttacctaattctctttaacaagaaagggttacttcagatgtaattgtagtttaggattatagtggacatatgttttccagagattaaaaaaaaaatctgctagccattacctttgttctcctctgtgcagagggacatattagaaaaagagcaatgtgaccaaaatgtgctagttgtcaaaaggacaggttttcagctaaagattagctctttccaacagaatttacagcaataacataataatagcacacattccaatagcatttacagcaataacagaaagttctgtatgtgtgccagcagtacaatagccactaatcacatgtagctgttcagcatttgaaatgtggccagtgcaatggaggaactgaaaaattgattttaattaattttaatttaaagtcaagtaactgtatgtgtctactatattggagagtatggagctagacactgaaggcctaacaggttgggctgccttggtttctgaatcgcttatggtggcacctgacctattccatggggtctggaaggagtgcttgtcaacacatatctgccaaaggcattaatgctcatgcacttctttattttgagactatttcctttaatgcagaaaaggatgccttctataaaaatcatctcttccccaccatccagaaatgacattgttgttttctgtgtttttatataaaagaaatacagtggtactgattcagttgaagtcttcttttatccccagtctccagtcacagacttttacctcacctcctagacttttatcatcatgaaattatgtatttcctattttttctccttttacacacacttacacacacatctgtgaacgctcaatggcattatcttcatattcatttaaaatgtacgcaaatgacttcacactctaggtcaggggtccccaacccccgggccatagaccattactggtccttggcctgttaggaaccaggctgcatggcaggaggtgagcatcgggtgagtgaagcttcatttacagccactccccattgctggcattaccacctgagctcctcctcctgtcagatcagcagtgacattagattctcatgggagcatgaatcctattgtgaactgcatatatgaggcatctaggttgtgcgctccttatgagaatctaatgcctgatattctgtcgctgtctgccatcactttcagatgggaccctctaattgcaggaaaacaagctcagggctcctactgattctatattattgtgagttatataattatttcattatatattgcaatgtaataataatagaaataaagtgcacgataaatggaatgtgcttgagtcatcccaaaaccatcccctgccccccgctgccaccccagtccatggaaaaattgtcttccatgaaaccagtccctggtgccaaaaaggttgaggattgctgctctaggtgttatattacactttgtttttgtcactcaaaagattgatttgtttttcttttttctttttttttttttttttgtttgagtattactatggagtcgtgagtcatttttctttctacttacccagatttccacaagttttaccaatgggaactttttaatggcttgcatttttggaaatatcagtattgattcatgtaaaggtttgtgggtttttttggggtttttttcgtttttttgtttttttttgagatggagtctcactctgtcacccaggctggagtgcagtgacatgatctcggttcactgcaacctccgcctcacaggttcaaacgattctcctgactcagctgcccgagtagctgggactacaggtgcctgccaccacacccagttaatttttgtatttttggtagagacagggtttcaccatcttggccaggctggtcttgaactcctgacctcgtgatccacctgcctcggcctcccaaagtgctgggattacaggtgtgagccaccatgcccatcctgttattccttttaactgctgtttagtattcctttgtgaagaggccatattttattcatttccttgttgatacgcatttaagtctttttcaagttttcagctcttacaaacactatgaagtaagattttttgtctttgcccctctgtacacgtttgtgaaagtttctttaatatatctaaaagtgaaattaccagatcacaagtaatacacatttcagtcttaagttttctaaaattttacatttgcagtcctaacagcagtgtgagagaattcccattttccagttcctcacccatactttccagtatgacgtatgtgggactaaaatgcaaagaacttcagagctcacctgatccaagcattcccacccccacatttccagatgcacaaaattaagacccggaaaggataagtgaatggttccttgaggtcaaaaattacagcgaggtggccagacacagtggctcacactgtaaccccgctgctttgggaggctggaggactgcttgagtctaggagtttaagatcagcccgggcaacatagtgagacccccatctctacaaaacattttaaaaattgcccaggtgtggtattgtgcatccctgtagttctagctacccagaaggctgaggcagaggattcttgagcccagaaattcgaggttagccttgtgccactgctctccaaatcaagcaacagagtgagaccctatctctaaaaaaaaaaaaataatttagaaaataaaattatactgagaaatacaaacagctattcacacaggaatggagagttcttctttacagtattcaggaggtatacacttatttccccatttaatccttcctggagcagctcttcattttcaatcctcattccttacatctaaacttagtccccacgtctccctcctagaggagataagcattctcaggatgcagtagtttcgattctctattccttagaggaagatgaaggcatgaaaatgtttgcttatggatgctttgtatctttttagaaactttatcctataatcgggaaacaatgcttgtggcattggaagagacttgcatccaatgaattctgtagttattcaacttcccctcagcatttaatcacccacaggtggcatttacaatgttctctactcgttcctgcaaacattatcccttaattacatcacagtgggacttagagtgcattagtgcactgaatgatccagaaatgtaggagggcaaaggaggacaagtctggacggattacaatggacccaacttgtcatcatgagaaacagacccacaaatacagagttaatcttcttgagctgtactggccactgtagaagtgccaaggacaccccgttagaaatgccaaggccaccctgttagaaaccaggtcttggggaatgacagaagagatttctctccagtttggttgtggccccttctcttggctcacagttcttctctgtggctctcaggccaccatattttatagtctatttaaggaaagagagagataatgaacttggtttggaatcttacttcatgaaaatttcacagaatttaggaagcatcttgtctaaatatcttgttctaaatttttagtgttcttctccagtccttgtgtgctttagggtggttttgattagattgggcttgacagttacccagtcccagatgagtgtcccctttcctgcacctccccccattcacgacatggaaatggaaagaatcgagtgaggtctgaaccccaggtaaaattggcaagctgactaagttcgccttgggtgacctcaccttttcatttctgtccattttcctctctttttgttccttgccatctccccatatctcaaaaaacctggaccttgtagcttttctatactggcccccaaaataaaagtctcttttcaagcaacgatctctaaactcatttgctatggtattgataacaggtatggattagtcttatcactcccaagagtattatcattttgggccaggtgtggtggctcacacctataatcctagcgctttcggaggccaaggcaggtgaatcacctgagtgaggtcaagagttcgagaccagcctggccaacacggtgaccccttgtctctactaaaaatacaaaaagtaactgggcgtggtggtgggtgcctgtaatcccagctactcaggaggctgaggcgggagaatcgcttgaacccaggaggcagaggttgcagtgagctgagatcctgccattgcactccagcctgggcaacagagcaaaaaaactctgtctcaaaaaaaaggtattatcttggcagggacagcagttcctatttcttaattgaagaaatccagatttcttctcattccaagagtctgtcaggtaactttcactgttgatgttgctatttccatgccaatcaataatcctgatcatacctgtatcccttaaggaaatcaaataactgaaaatgaagatctgtggggcagataaattcaggaatatttcttcgtttatagaggattcacctcatgaatttgaaatatggcttggcttataaaaagttgatctgcctggagcttgtagctaacacctctgtcgggccaaacaataaatgcttacactgagaaagccaggtttgggatttcaaattaatgtgcccttaacataaactgcagagcccccctgggtggagggaactattacctggttctaatagcagatgttttctggccttgagtgccagtggtaaccagagtcacacattttaggattttggtattgatgagggtttcagctgaatattacttgagttgaactccagttatctttacctgtcttaaaggagcagctgccatagtgcctcaggtaaagttggcttgggataggctggcattgccttccagtccccagcctcaccttcctcccacctcttcactgcctcttttctttgccctgccccttcaggtgtcctgcgtggggcaccattcgagttgcattctagtgtattaggttggtgcaaaagtaattgcggtaatgtgtgtgtgctgccccgtgtctctaccttattcaagtttctttaaggaacagctgtagatgagttctggtagaactgggtagtgctcccagaagtatccccgtgggtccgtgagggttgggcattcataaaataaatccttgctctaacgatagagaccaacttctagagccagaagtgctcatcccaggaatgaccaggggctcccaaaccagcggctcgggccctctgcagtgccatgtgcagcctctgtgggttagaggcatggagctagagcagggtcctctgaaccagagccaggcaggacactctgagaaatcacaagcagaaggacagcaattctgaaagcagagcagaacagctggaaaaactgagctgatgaaaaggattatccgaatccaagcttggcgttccttgctctgtgtccagattaagaaaatgctagtggtttgcctaggaacacatttgcaccaactcctggcttattttccatgtgacccaacagctggtactagagacaccagctgctttctggtgggggcagaatgaaaacagcatgggctgaggccaaggcccagcaaggtcttcaagggcatcctatcctgcggccgccagaggggtatgtgcggagatcacaggcaatgaggttgtaatgagctgttaagctccctgccgtccctttaatgggtgattacagtaaaaagagccacataaagtacgttttcatctctcacttcagcccccgagagcctctgaggtcttgtttatccaattatcagacttgctgtggaggacggtgcttgctgagaacaagcatatcagttggaacatgatttctctgatggataattagctgttttcaggactcctcctattcagctgaatgttctcagaccagaagtctgatctggcctaacggggatgtgctcccatatcgcagtggagtcttaaggagtactacccaccttctcttctgcgggggaaaaggaatggcgtagcatgcatgcaggacctgaccggaaggaatgtctgcgagttatgatttagtgactagaacttctaaggaaagaaatgaaccagaaataactgcaaacgaagtggttaggaagaggggcaggacatggggagtatccttgaaagggacttaatttcatccaaggaaataggttcccagtttaagcccagttagctctgtattcagagtggatcttctcagtgctaggtgaaggaagggtggttgtgcatcagagtaagtgtccagccccaccctgaagactcccattcaggtggtctgggatggggcactggtggtctgacactctcttttgttcaaaatcaaagcgtccccctccttctcatggaagggaagcttccaccaacccttaatgagttcctgtaccatatggagttgtcaaatgctccataccgggcacagcggctcacacctgcaatcccagcactttgggaggccgaggcgggaggatccattgagcccaggagttcaagaccagcctaggcaacatagcaagaccctgtctctacaacaacaacaaaaaaattagccaggggtgggggtccacacctgcagtcccagttacttgtgaggctgaggtgggaggatcgcttgagccaggaaggtcgaggctacagtgagccgtgatcatgccactgccctccagcctgggcaacagagtgagactctttcaaaaaacaaaaacaaaaaactctgtcctaagtatcagatgatgcggaagcccagtacttggttttactaggcttagcaagcagtcgcttatggaacagaagcttttataaacaaaccatgtagttaggaagggcagtggcagcccaggcaaaatctagtcatttgaattagccaaggaacggagacaaagacaaagtgaatttctggtgctagttgcaacttggtctcgataataaatcaggaacacaatccccacattcctaatgccttgctccaaaactcagcaatcctcctatttgtaagaatgaaaaaattcaggagggaaccaattgcctaaggttatgacagcaaagctaccgttccagtataatattcagccactagaggacacaattcactcactttctagattcagacacacgactacctttttcgttacaaaacatatgaagtcgtgatttatgaaagtaggacacatattgtattttttgcccttgaagtgcaagaccaggaaaaactgaaaagtattgcagcatcctccgagatcactgttgtcattttttcgcaaaggattttattctagcctgtcagtttctgcctcctttcattagtaagtcctgaccttagacatctggcatttttttggaaggtgtagtggggagggggaccaagagatgcatcccttaatgtagctaaagatcgaaatcttctcattttggggagagttgcttactatacatatttacacattcaccaattttgtctcatatgtaaaccacagaatgtgccgaattttcctagaatcatggttgaggcaggtaggagtaaggaggtgctgtgtacattagtgtcactgattccaccgttcacaactccataccactctccttattttatactcttgagtccacagtgctttggtgttacagcccatatagaacggtcctacctaaaagtcctgcggtcggtttaacagtgacgagtgtcatttttccactgtcctttacatagaattcagcaggaagcttcatgaggcaccctgtttctacatgagttgccctggttggtggaggcagaagcaatggagaagtggtgatgaaattaagtcaaagttaggcttgcatttgactctgatcttgaatagtttgtctagattagagggagcacctaaaatccaaaaagccttttgtctttgatttctatacttttgttagttttacaaattattatttaaaatcagtcctttgaagtggcttcttctcttctgacgggacagctttgggaaactgtttagtcttatttcttttgctattgggaagttgtgggggacgctattttgcagctttttcatcctcagttctgacctcctcatgtgctttacagatgcccccaaaggtcagcattcatccacctttcactgagagtgtttggccatctctaaagcagaggtattttaacagctctccttaatggatgtcctgtggtttcaggcctcagacaggctgcccttgggccctcagcagaagtcgggaatcgtcttatacttccagatcgtcttttactcaggcaaaatatgagatgctgtgtcagggtttcccaagggaagaaactgagtgggaggtgcaggtaaaccccacagtacaaaataaaacagagctgtgagtagttgaaaggactgtgttttgacagcgtaataaggtaattgtttaaaaccatggctaattcatcagatgtcatgtgtcttttatagttaaaagatgaaatttctttacccactggtgtcaacaacagaaagattctaaaactttcaaaaaatgtgccagtcctggctgctttgtttcatgttctttgacaactttcaaaatgtaaattgagattcatgcaactattaatggaaatataaatatcatggcttcataaggataaaattagaggagctcaacataacggctcattttaatgatttctaaggggtttccatgcccaggctaataactgtacatttagcaataagcaaatctcaaagcctatttcttatctttccctagaattacagcttttaagcccaagctggtcgttccttttataccactccactcacttgataggggtgacatgggctgagctttctctcctatcagggctcaaagacaagtttagcagcgtttctaaacttctgtcaatcagctcacaggacacagaccagtttcgttatcccattaacagatttacatttctgttctctggaagtgtcagttaatgtccttaaaggtaatatacacaaatgtacacaatagtctctgaatttttctcagaagacacactcagaaaccttagaattctgattcattctctttggctcagacttggatgaatttgcttctcagagtagggacatgaaaattattcttaatttatacttcatgtaatctgtttcttctttctccctccgccgccctccaatagctcttctgagcttgtttgttcttcccctaactcccattgttgaaaacatggcctcccctcattctcacctttccaggaatctccttgtgctcctcaagttcggctcatcgcaaacttggagttctgttttctcatgcccttctttcattttcttcttttaagagacaggatcttgctctgtctccaagattggagtgcagtggtacgattctagctcactgcagcctcaaactgctgggcttaagtgatcctcccaactcagcctcccaagaagctaggaccactgctgtgtgtcaccacaccagctaattattttatcttttctagagacaaggtctcactctgttgcccaggctggtcttgaactcctagcctcaagcaatcttcctacctcagcttcccaaagcactgggaggtgccactcttcttgtgttttttacctttgcatttatttcctggttacaatacttttaacttaatggctgctgaactagattctgccaatgtacgtgccgtccaggacacgttcatgccactttaattttcttagaacatcaatgagatagtcttactagggagagataaagggcaggggtttggttttctggcaggttttctttcattttaataacgagccaacccacggaggaaggaattgattgatggctgcttcctcttttgtaaagaacaaacatcaaattagtggtttgtcctcactttgcggataagcagaataataacacctgtgcctctccctgcattattttgaaactaatataattttgtttggacagaacgtagatagcaaccttaatggggaggaatgtggaagaggaattactgaagggggaccagtcagcctgtcaggcagcaactctggtgccaaagaatggacataggatcagagctgtggacccccgtcctgtttgtaaacttcctgagggtggcagagattcataccctttctcccatcaggacaaaaatcagtgtgttggagctcactcaggaaatgctctttgggattggcatgggaaggggatgaggccgattgacaattagcctagttcactgggattttgttgtaggagctgggtggtggcaccatatggccaacaggggatgccagcgacatccctaatttctctggcttcctgataggtcctggtagggtcggggttccaccgggatttgcctagtatggtctacctctgactgaaattaaactctaagtaggtaactggggaacgcctttctccagagagaaggttttgatgtgatctcatcatcggggactggattggacctggagaaatcagtttttctatagtcttgtttctagagtggcaccctggtcttgggcaggtcagaaggacagatagttggtcaccatcttcaacacaaatcatggctggaaaagggccccagtagggagtgcctttctcactcaccaatcaccaaggctagaagatagtctgcagattctttcagatgccacaaagctgtgattacagctgcccattggcaaatcaggtactagtttttgttaatcacattgcagtcttccttcactgtttcttcccctggtcccggaattaaggctgggctccatttgacaagttatcttctgtgcaggtagagcagcaggctgtgttagctcacagcatctactcagtaggcatggaaatatccactgaatgggactgagaaagtggaatgggaggggaacgtgtgaagaacaggaagtttgcctctttatgtccaaagtctgtctacttagagcaacaggatggtgatgatgctttctggttaaagatgtcatggcaacagtcttccctagacagctctctagcaatagccagtggcatgtaaaccctgcatttttgcactgtatccagtgtttgcaactcccttgtagaactttccctgaagtcagcaagaaccctgtgagaatcaggatttgtctagaaatttagcatttacctaatcaatgattctctagacatgtcagtacctccaagtgattcatatgcatgtttggtgggcgtcgagcatgtggcagtttggagaaggaagtggagaatgcagcagcagcaggagaaatgtttgatgttgctaaacatcaaccccacagcaagcctagaactcggggaatgggaggcatggtgcgggtagctgctgacacacagctctagagatagctgcctgcaaagctggatgggactccaggcaataggcttcagggcctaactgctctttcaaggtcactgattgttacaggagccatggtctgcagcattgagcatggaattattattactattaagcatgatcctcaccgtgatgctcttggggtggaacaaaagagcccagagagaatatgcttattttatgcaacctctaacgtttcctcccagagttgtgatgaaactgaaccaaactctagcatgagaatcggcatcccaggccagcagccaaaacaagtggtgacacttggccaggcacggtggctcatgcctgtaatccctgcactttgggaggccgaggcgggtggatcacaaggtcaggagtttgaaaccagcctggccaacatagtgaaaccccatctctactaaaaatacaaaaaattagctgggcgtggtggcgggcacctgtaatcccagctacttgggaggctggggcaggagaatcgcttgaacttggaggtggaggttgcagtgagccaagatcgcgccactgcactccagtccagtgacagtgtgagactctgtctcaaaaaaaaagtgccgatactttatatatcttctgaaagaaatgaagtctgtaagaaggactgttaaccctcagaatggtctggggatgctacatccccttgtggacttgtcacactggtatgagtgtagggagtgggaacacttcttctcagctccttcctcaccatgtgtcattcagggacaaagggagcaggatatcttccctttgaaaaatctcatatgcctggcaatactcgtcaccctgtgaataatgttgatgcattcacctaaccagtattataagcccctgctgtgtgtcagacactatgcttggtgctgaaatagacaaggaggggactgcctgtcttggaaggcaaatcccagtctcctaagagacactagaaccacaggcaaccatgctgatctatgcaatgacatgtaatgcaactttgtcctgcaaccaccttgagatctttgaaagttctcctacctccaaaactcagacaagtcctctctcttgccaagtgcctaaagcaaggatatgtttatagaggcagctgggggcatctggccaatttatttcccagcagacctgctgcttcccctgattccaatactttcttccccaacccaaaccaaggcgtctggcaatgttaaaaacatcaagaatgataaaacaagcattttaatgaagattattgatgtattcattggctgtttctttaaatgggtagagaactaataaaggatctaccccaaataaccaaaaatatcagcctcagcaccagcagaaattggaagcgttctggtatttatatgtgtttttctcagctggcagatttgttttaggaaactatttgcaaagcctgggaaaaatgtgctttctctgtctgttaaaggaacatgcaggttggttggtgctggttctccatctgacagttctgtctggtggcctcaaaaaaaaagaaaaatacagcatagtccagatttggactatgcaaatggtgtcttgaaacttaacttttaggtcttgagcaaagccaagtattattgaaatgtttattttgtttttatctgcaggaggttttcattcaaaatgtggtgctttgggggaaaaggaagggtgtttgtactaggtactttttagcattcttcttattatctgacctatcacagcctcttcaggagacattaattaatttagttcatataatcaacactggaaccaaggaaaaattatttatacttttagaaattctcatgttcttatacttctttggagattgaattgactccaaagagactattttgtgattaagaatatttttgtggccgggcacggtggctcacgcctgtaatcccagcactttgggaggccaaggcaggtggatcacctgaggccaggagttcaagactagtctggacaacttggcaaaaccctgtctttactaaaaatactaaacttagccagccgtggtgacgggcgcctgtagtcccagctactcgggaggctgaggcaggagaatcacttgaacccgagaggtggaggttgcagtgggccgagatcacagcattccactccagcctgggaagaatatttttgtgtggggagtcgttatattatgtccttagaccaggaggtccaattgaggcagaaatttttgaagtaaaaccattttttttgaaggaaacacatatttaaatatcaaagaacactggacgtatacttttaaaaatttacatacttgtgttagttatctattgctgtataacaaaacctttgcagctcaaaacaacagtcattatctcacaagtttatgtaggttacgcaggtgcagctgacctgcttggtctgagctttcgaaaagtgcagtgaggatgtcagcctaggctgccgtcacctcaagggtcccctgggggtggatccacttccaagctcactcatgtggctgttggcaggatgcagttgctcacgggttgttaggctgagggcgtcggttcctcactaagccagaggcttccttaagttccttaacatgttttctcatggggggcagctcacagtgtagcaattggcttcgtcaaaacaagcaagcgggagggtaagagacagaaagcaagacagaggccagggtctttcacagcctaatctcaagagcagtacctcatcacttttgtcctattttgacaaacgtcgtattgacttttgtcactacatcagaagcgagtcactaggtctagcccacactcaaagggagaggatttcacagagcaagaatatcaggaagcagaatcattggttatttcattagaagctgctggcacagttcttaatgaagctacaaaacattgaactgggaggaatatgggggtaggagggtgacagggagggcaggttaattttgtggatgctgaggacaacgtgcctcatgaaaagtgttcccatcagactggtgtatttctgtttcttttcttttttttttttttttttttttttttttttgagacagagtctcgctctgtcaccaggctggagtgcagtggcacaatctcagctcactgcaacctccgccttcctggtacaagcgattcccctgccttagcctcctgaatagctgggattacaggcatgtgccaccacgcccagcttattttttgtattttagtagagactgggtttcaccttgttggccaggatggtctcagtctcctgaccctgtgatctacccaccttggcctcccaaagtgctgggattacaggcatgagccaccgtgcccagcccagaatggtgtatttctaggacatctgcaatgcatcactctctaataaaagaaaaaaaaatagccactccttgacagatactcaaaggtgtggagtcccttactaaaccacactccaaagaaataagcctgcaaaatagggaaaagttgttttttacctagaaagcagattctctgcattttcttattttcaaatagtggggagaaaccctaagctgtacatatgaaggaatggattcatttctcctcttgcacagcaccccagcaccttgtacaccctattcctccctaactcccaaccgcacactcacctcccaagcatctgcagatctacatacatattatcaaatgtacagagtactgagtgaaatggtcactgtagctatggaaaggtgagatttgcaggctgtctgaaatgtttcttgctaaagtagttccaatccttcccccatttagaaaaaaatacattcttagtaaatgactttcaggcagaaaaagaaaaccacactggaaataggattctaataaaccaacatggggctctagctggtgaacatatttctgagccatccctatacagaaaccacaagacaaataagaaaaagtaaatccagatcacttagacccttcaaaccacatcctgggttccaaggacagtggctgcgagttaggaaagatacatttatccagtggaccttttgactgtcttgtcaatcttaagaaaaaaatgtagagtaaaaaattttggctgggcgtggtggctcacgcctgtaatcccagcactttgggagaccgaggcgggcggatcacgaggtcaggagattgagaccatcctggctaacacagtgaaaccccgtctctactaaaaatacaaaaaaaactagccaggcgtggtagcaggcgcctgtaatcccagctactccggaggctgaggcaggagaatagcgtgaacccaggaggcagagcttgcagcgaggcgagattgcaccactgcactccagcctgggctacagagcgagactctgtctcaaaaaaaaaaaaaaaagaaaaaatttggtttgggtcccttcccaccttcccttgcttcatcactttccttaagcctctaagcatccagatcttccccaaagcagtgcttcctagtcagtgattaccctatcctctttttattccttttcttcatgcacaccttcagtccataaatccaagctttttgtaaggagggagggtgagtaaaccaattcatactaaggtgagagtgaattatatataaacctcttaatatattaaatctaccaagcagtgtttcagaaggaaatctgctaacatgggcatcttacttgaaaaaaatttcagttggttcaacaaagtatggtttagaaatcattttcaatcaggatcggggagagaatttttttttttcttaaagcagttaggtttccccagcagatttcgaatgcttggatatttgtgattcttttctatgggaatctgatctggataagacctaagaccataaacactctagctttccctttgggtctttgctattgaaaactagttggacttaaacaagtgaagtgggttttaaggatggctcctttcacccatttctaaaagatagcattcttgagggtctgctttatttagcagaaggaatgctggttttccaatctctcactcaaaaggaacttttacttatctcatagaaaagaatgggatggagattaatgtaatagaaaaggtattctacaaatatcatagcagctatatttaatcaattcatgttcaaagatcaattagtagtaataagagttgtgctgtataaaatcaccatatctcatattcaaattgcagatcatcagttgaaaaagcatggattgttttctcactgaaagaaatctttaaaagtggtaccataagagacattaagactggctattgttttatttctctctctctctctttctctttctctctttctgtcatttgatttctgactttcagtggatttttttaacattacaaaatcatagagaaagaatattggaccatttattgtagagtttttaaacaatttgataccattttttttttctggcgtcttaactgcatttgctgtttgtgaggggtgtagaggtccctgatgttcagagtacagtaccagcgtttatgtgaaatattgcagcctggcctgtggaggacaggggttactaaggggcaagctgctgcttgcgataacacccccagtgcctccttctaatcttgcgccatttcccagggcagacagccttgtggggctctgactggtgccctggaacatgttttaccttccatttttcttgctctgatttctgaagacagaatgttctcttcaacctacacatcaggagttttccttctgttttcctttttcactggttcctttgtgaatttgcacttttatctaacctaaaacattggaaacaggaataaacacaaataatggcatgaggccgtggccacagaatgacaagacaggacacagcaaatgttttgggtttttttcacatttatgaaccttctcattctatttatttatttatttacttacttatttcttgagacagggtctcattctgtcacccaggctggagtgcagtggcatgatcatagctcactgcagccttgaactcctggactcaagtgatcttccagcctcagccttctgagtagctgggattacaggcatacaccaccatgcctggctaataaaaaaaaaattctgttgtacagatggggtctcactatgttccccaggctaggctagtctcgaactcctggcctcaaacagtcctcctgccttgacctcccaaagtgctgggattataggcctgagccactgtgctcaactgcttcccattctaaaaagtgtctaaggcagttatagaggttatataacaaggtataaaatttctgagtgaaaggaaaataaggagagagaaataaatctaagtgtgtgtaaggttaatatgtacacagaatgtttattaaggcctttgacagttcctttaaaaattacctgcaggccaggtgcggtggctcatgcctgtaatcccaacagtttgggaggccgaggtgggcggatcacttgaggtcaggagttcaagacaaacctggccaacatggtgaaaccctgtctctactaaaaatacaaaaattagccaggtgtggtggcatgtgcctgtagtcccagctacttgggaggctgaggcaggagaatcgcttgagcccagaaagtggaggttgcagtgaactgagatcacgccattgcactccagcctgggtgacagagggagactccatctcaaagagaaacaaacaacaacaacaacaaaacctgcaaatttgagctgcctagcagccaagcaataaagggaatcacaatgaacgataagattcatatatctgccaatttaaaaacaaaccagttctcttgggtcagtgcttctcaaacttgaatgtacatttgagacacctggtgcattgttaaaatgtaggttctcatctagcaggtccatggtgcatttctaactggctcccaggcaatgctatgctgatgctgatgctgacgctgacgttgatgctgctactcattggactgccctttgagtagtaaaattttagctcactcagaaaaacctcatagtttatttggagtaacatccctttagcccttgtagatattataagactacattacaataaagttctggtgagtctaattgttgaccagagagattgtttacttcagagcacctggatttgaattgcagtgtgccacctgctgctgtgttacctggtacaagttaatgcattctcttcacacctcagttttatcatcttctgaatgaggctaatagtagtacctgtcatagatgcttgtaacagtgcctgcatagagtaagaatgaaataatgttagctattttttattgttacatttaaaatagattttgctggtagtgaaatatgaatgataaaatcatctcctcagctgttttccttgcataagtaccttaaaataatgtatttgcaatttccttctgaatccttgaataaaagacaccagataatcagaagatgttactgacattagtaggcatttgaagttcactctgatgggatcagtctatttacaacaaattgctatagagagtaaaaagcgccaaccttttcctgtagtttttgaatgacagcatctttgttcatgcagttggctttgctgcatttccacttcatcaattttttggctctgtctttgcaaaaaaaaaaaaaaaaaaaaattacagagggagaattttaaaacacaaatgaagaaaaagaaattactttgaaattgccaaaattgtttggctgaaagagcttatttagaaaaacagagctttttatgtataaacctgtttcattggtgttgtatcagaattgcatgttgctagtagtttactatcaaaacaacacttgtgtttcaagctgttaaaaaatgaataaaataggccaagtatggtggctcacacctgtaatcccaacattttgggaggccgaggcgggcggatcacttgaggtcaggagttcgacaccagcctggccaacatggtgaaaccccatctctactaaaaatacaaaaattagccgggcctggtagcatgctcctgtagtcccagctactcaggaggccgaggcaggagaattgcttgatcttgggcagtggaggttgcagttagctgagatcatgccactgcactccagcctgggcaacagagcaagactccatctcaaaatttaaaaaaaaaaaaaaagaataaaatagaaacactgatttttctggtattttatacccttccccgaatatccatacccaaggcatttttaagatttccctaagctggaagcaccagaccacatgttatttaaaacatattaagatgtacctactgtattatgtatactttgtatatcattttataacagtctgcaaagtagcaggaaaaaatttttgccttcaggttaaactcagaagagttgccattggctaactgaaaaattttgcatttggtaagcatttaattaaaaatttattgatttcggttttgaggttttacttttcatatttttagagccaataacttctggaatctcagacatttttgtggaatcttaagttgttcatagatcctaggtgctgtgtttgtcatcctgagagcttaaatggccctgtccaaacctcagcctcagctcagagtaggaaattgtcaagcacttggtaactggtaagcaaatggattttagtcactaaatggagcgggaggaatggagtgctccctcaaaaagagcatttcagctggtcacagtggcttgggcttgtaatcctagcactttaggaggcccaggcatgaggaccacttgagcccaggagttcgagaccagcctgggtaacacaggaagatttcacctctacaaaaagtaaaactaaaaaattagccaggcattgtggtgccttgaatctgtagtcctagaaacttaggaggctgaagcagaggatcgcttgagcccagaaagttgaggctgcagtaagctgtgatcacgccacagcactccagcccaagcaacagagcatagactccatctccaaaaaaagaggctgtgacagaggaaggcagggggatgttaatcagagagacatagagactgggagagtctgaaagagaggcagagagacttacacaaattaaagacacagactgagagaaatggaaaaatgaagagaggatcccagacagattgattgacttcccaggtaacatataatatcttacaatcctgcagaatgtttaaagttgcattttaaaaggcactccgtttgttcacacaatcctggtaagaagatcatcttaattagtatcatactttgcagctttcaagcagttcttaggcatcattgcgtttaagacctggctccagccgttttattacagatgaggagattgacttgttcaccttacatttgtagagcattttgcaatttttttgaaggacatttccacccattatctaatcacaagtctccataaatcccatctcccctggtataaaagcagcttaaattacaggtgctactaagatgcaaaatgcagcccacaaaatcagcaaatattttttctttgtttcctccttttttaaaaaaggcgtagatttcatattactactttgtttcaggccgtatattgaagtaacaaaaataaaaccaaaattgacaccaattttatttcgaaataaaatctacttttttcactttcccacatcattttctagctgctaaccttcatgcatattcaatttttgcatatttacagccctgtcaaagataaaattttattttctgcattttcactcaacattatacactgagtattggccatttcactcatctcagtgccactttcaaagagatacccaggaaaagcagcagcaagggttgttcgaccttgaacaactacagataatactttggctctctttgagatttttaaggccctgtaagtaaaatattttcagattacagaaggcttgggattctgtctttatcacatgactgattggtcctccatgttctccttggcagatgtgggtatcagtgacacaatgttttttactcaaaacatggtttagcttaccagtaccaggaatggccgatgcatacgcattctcattgtgaaggtttatttgcacctccactcttcttaaccaggctattttcacagaagaaataaccccaacttcatgaaccctattcccatgacctatttgccaatctgttaaaataatggccaactcaaatgatcagtaatgattgactcaccatgacatcatccatcacctttgtcactggaagcccacttgccttaaagggtgcagcatcttccaactttgctccagcaacttcagctcctcattaaatccctccctgtaggtcatccctgcaaccagttgacactggagctcagcagccagctgataggggccttcactcctcttgtcgagctgctcctctctcctctcaaagccctctttccttctctcctgctggctgacctagaagctcagctaaagaggtgttcaaagggtccagtcgcttaaacaggtggccagtgtgctttctgctataactccttgctccttgagctcagctccaagctgtagaaggccatggaagagcacattgatgtcatcttgggaataattaacagggtccggtttttctgttcgtttccttgcaccagatgaagagtaggataaacttgggagaagccaaagtgatgtttttgtattgtggctttgaatgatttcaaggtcccttggttaacctattctcagcaaaagaaatagaagatggtcccaagatggtaagagcagagtgtttggttgataatttgatctaaaagtgaccagactccacaagttaacccccagagctgctcaattacagcagtttaaaaataagttgaggattcgttgctaaatcagtggaaagaatttggagtttccaaaatagtttgtaatcaagaaaagccatctgaggaggccctggagggaaaatcgctgatgattatcaaatgtccagttctcaatgcggtggtatatgtgactgaaaaaaaccacttttgtccacatttggggaaagataagattatactaaatgcctggcacatacactggaccttcagttacctagaaaactttcaaaataactttgccataacaagtggcaaattattaaggtcatgggctgtcttctcaaaattacttagataacatgattctctggccagtatgagacccttaatttatcacgtatgaagcatatgagcctgtttatccgttcgttaatcattatttttatctggcttgggctctgggttactggccatgcaggcagatcttcccttccaaaaggaaacgttattattctcttgtattcgtttctttaaaaacatgcagatttaacaaaacatattacttagcactcttactgatttagaaatatgatgacccttaggaaatgcatctccttaaaagaaattccaggcaaactcatttaacctttctggatgttagtttcctgaccttcaaaaaatgggatgttggaccaaattatcttgaagtttccttccagctgtgtgctcggtggggagtgctggcagtgtggggcaggacactgaatatctgtggtggtgatgtttggatacaggggtgagcaacccctttggaagcaacatgcaaaattgctgagcagtggtgggggtgcatgggaatgggtggcggtgcccctgtattggagtgtaagagacaagtgtggtgagagcagtctggcagggctactactgttatgatttacacagtccctttcatccagctacttcaaagcaccttcacaaactctggctcattattccttcaaacacagcattcaagaaagattgataggcgccttttaattaattcaaagatgatgaagctgagcattacagaatataaggggattcttccaaaagtatctgcactgcagaggggcatgatatataaagtgttcatcacaggtttctaactgaaacaaggaaatgacctgaacgcttatttttagaggagaccagtatatattatggcatattcagaatatgcaataccatgcacccattaaaatcatgtttattaagaatagtcacattagggaaatggtcataactgaacaacgtttagtggcataaaaaaagataaagctttgtacatacagtatgatgaaaatgtttaatgtggctgggcatagtgacttgtgcctgtaattccagcactgtgggaggccaaggcaggagtatcactgaaggccaggagttcaagaccagcctgggcaccatggtgagaccctgtctctacaaaaaatttaaaaattagccaggtggtcatgatgcatgcctactattctagctactagggaggctgaggctggaggatcactggagcccaggaggtcaaggctgcagtatgccatgatcataccactgtactccagcctgggcaacagagtgagatcctgtctcaaaaattgaaaaaaaaaaaaaaaaaaggtttaatgtgtagaagggaaaaggctaaatggaaatgtgttaaagtcttaacggtgatcttccttggagcaatgatatagtgggtggttgctattcttttctttatacttttatgtacttttatgttatgcaaggttgaaaaaatgggcacatattgctttcatagtcatttctgttaagataatcatatgattatgaaagagggagtgtgtgtgtgaaagtggaatggaccaatcaaatagaacagtaggaagacctcagaagatatgacacatgagctcaaccccaaagatgagaagaaccagccatttagtgaatggggaagccctctggggaacagaaggcacgaaggaaggaataagtttggaatgttctaggttttgaaaaaaggccagcatgggagaatgatgaaagataaggtcagagccattgccaagggcaaggtcatgtaggacccatgacgaaaagtttgggaaacccttgtaggggactgacataatttattttacatttttgaaaaatccttctgaccaatatatgaggaacattgtaagaggcaagtgtagaagtcaagatctattgagaaggcgttgcaggggtccaggtgagaatgaggatggttcagagtggagagacagggacaaggtaagttggagtgtgggtctgacttgttagccatgtggaggaaataattatcataataactatcatgtatgtttttagggggctctataacttcagtatgttttcagtgttcacatttgtaggtttacagagtttgtacttgataaggtacagaagtaagtcacttctcaaaaatcatgcctttagaagcatatatcatgcttctattatagtaatgataataatagaagtctactgctagtcataaaacttatctgttcagagaaggctttttttttttttcagagaagtcttccaggtttcagctgttgctcattaatgctcaccacagccctttgaggtcgatgcaattatgctttggaaaagctaagtaacttgccaaaggccatgcagctaaaagaagcaaaagctggattcaaatctcagctctctgcctccagagagaacaccctcaatcccgcttaacagacattagctctgcttatttgattggtggcagtggagatgaacagaagtgaacagtgagcagagaggggtctgtaccccacacacatccctgcaccccaactgtcaactgtcttccatcatcatttactatatccacgtccactcctgacagcatcagtggctcagtcttaccgacctgcatcagggttttgggctctgcctctgtttagacagagcacgatttgggaagtgctgctaagtcagccagtggctgagtagaaacagccctgcagtgggcctctgcctgctctgtggctcgtttatcatgtgtctcatctttaaaagttggggctcagtctaggtgcctcctggcctgagcaccccagaattctatgctgatcccttcattgtgacatggcctgtcatctactcttctgggaagaccatctgcacctcactgatacttgaagctcattgagtattgtcacatatcagcccagaaagtcacagggtacagcaactcatacttgctcccagcaccaggccagccccattctgcctccagggagtcacccaaaatagagagatgagggtaaaataagacctaggaatactatttatttgcctccatggcctttgaacttgcacatccaacgtaacggctcctgtgtgttcttgattgttccaattatcatttttcctctcgaatacctgagagcattcattattttgcaagagatttgagaatccctgtgccctaacttttctttccttgatgtgggatgttcttctgtgactaggtaagtttatctcaatgtgtccccaaataatttctcagaatgttaaattcataaaagctaccatgaaaggataaataaatgaaaggagttctgaggtcaaaacatttggggaaagaagagtctttctccttctgaggcattctcagtgcacagtaacctgtttatctcgctttgccttgctctttcccaagcacatttttgctcaacgccccctaccttccccatacacttgttaacactttgcagagcactagggctctgtgggacaggctgggaaatgcaggttgacatgccactgttaatacctagaaaattaaggcaaacttgtccctgagagatgtcaggatagcacagtatggaaaggccatgcttatcagggctcttatctgagagaatacagtggttatgagcatgactctggaactagacagtctgggttgaattccccgctctgccatttagttatatgatatggggtgtattacctaacatctctgtatctcatttgttcctcacttgtgacatggggatgatgacaatgataatagtaccaacctataggatagctatgagaattaaacaaattagtaaatatgaagtatttggaacattggcctgactcaggataagtcctgtttaaatgttagtatcattattattgtttcttcaagccaggaatatacttcatcaattatgtgtacactcattccttcattcaacaaacacttacttaatactcctgtgtcctaggcactgttctagtgctggagatacatcagtgaatcaaaaacatgagagaaaaatccctgtccttgtggaacttacactgtagtggaatctactactaataatgcaaatagaaagaaaaatatatgcaagttacccaggcactgggtagcctagtacctgtcctatagttgtcaaatggatggatatattattcttattgttgttgtcgtttacagtaattgagcttggaggtttgagctgccatcttagataagaacagaaagctaagccaatacgagtgccatgccagtaagaaaaggaaactattacataaagattaggaagaaaaaagagaagaatgacaagtaggccattatctatggccatgagttttatttaaaatgagctggaccttttttgccttctttatctgtgtatcagatagacaattacctctaggcagatttccacattccaagacatgaagactttctaagctgcagcagacacatctttacttgtagcaaaacagagagcgatgggggttattttcagatgactgtagctgaagaggaagaatcaagtaattcactccccccaataataattcacttctgagaggaaaaacttctttggaaaaagcaccccatgaatggaagtctcagcatttgctgaagaacttagttaaaataaactctagacctttttcattgattctttatctcttcttttccagaaaccttctctatgtctacccacagaggctgaactttgtaaacaaactagcatcagcccggaacattacaataaagatccagtttatgtgtggagaagatgctagcaatgcgatgccggtaaggagggaaacgaacatttgcctcaaatcagggtgggctgctcacccctgtcacttcacacaagtccgggactcatcagtgtacaaagtccgtctattccaggccaatactgctcagcatgtgcaagggcttctgtgcccaggatatcagtggggaaacagggtcagtcttacttgacgatctctttctcggcttattctgtagtgagcttggaacatacagatcattttagaggattaaaaaaagtcataaagtctttccatactgcccataggaccaccccactctaaaggcatacaaagtaaagagatggctcaacacgtgcgccatgtttgctgagtgtcttccatgcacaaactgtacacactgtgttatacacacacagtgttacacacttactcaagcctcggaccacagtgctgatgaatacaaagtaccgcctagtaattataaacacacaccacctccacaccttctaggagtggatctttgttctgaggcaaaatataaatcaaattattcatatatatatatatatataaaatgcagtgtgctccaaggaactcaaaatgccagaatttatactttttaaaccatctcctactaaatgagatggtggttagctattactatttcccataagtcatagaattcagttaatataactttctttctttttttcttttttttttttttttttgagacagagtttcactctttttgcccaggctggagtacaatggccgcaacctccacctcccaagttcaagtgattctcctgcctcagccttccaagtagctgggattacaggcgcgtgccaccacgcccagctaattttgtatttttagtagagatggggtttcaccatgttggccagggtggtctcaaactcctgacctcagctgatccacccgccttggcctcctaaagtgctgggactaaaggcgtgagccactgcacgcagttaatatacctttctaaaaagaaaaagaaaaaaatcctttctcttaatgtcccacccaaagaaaaaaagaaaaaaaaaaacctttctcctaacgtcccacctgtcttcccaatgcaaggtgtcttaagacagcggtggggtcctcttagtcctctctgctcaggcccctggcatgccactgccaggagtgccagatatgcttgtgcagatcctgtggcaaccaagatgcccagccaagagtgactgtgggctaaagtccagtctgttcttcattcactgagccatgggttctggtgttgggattactgcatctagaggaaagagctttttttctctgcacaaaggtgagtgcacttgttcataatgcatcctaaatgctgcttcaggcccaaggaggtatctttttctaaatggcacaaatgtggataaggcagtggagattcaaatcacctaagtgagtaggtctgtatgtttgagagagaagaacctggaactggggatttctcactcaagacaaaagtatgtaactttggcctgttggatagacctctaggcagtgaggcagagtggagagagtactggttttctaatctcacaaacatgtggcctttggtcactaatatagccccttggaacctcatttcacccttcatagccagttcctttgcactggtgtgcttgggccagttgtagtcccagcacttttttttttctttttgagacaggatctcactcttgcccaggctggggtgcaatggtgcaatctcgactcactgcaacctctgcttcctaggctcaagcgatcctcttgcctccgccccctgagtagcagggactatacgcatgtgccaccacgcctggctaatttttgtatttttttgtagagatgaggtttcgccatgttgcccaggctggtctccaactcctgggctcaagccattctcccacgccgacctcccagagtgctgagattacaggtgtgagccactgctcctggccaacccagcactcttaattgtacaaaatgcagctctatgagaccagaacatcctgttggcctgatgatagtcaatttgatgtacccaaatgttactgataatttgatcctttctctactggtgaacaggtcatctttggaaaatccagcgggcctgaatttctgcaggaagtgtacacagctgttacataccataataagtaagtctatttcagcattctaaatatatgccaagatggtttcatcatctcctggtttttccaagtcccgtgggtggttcctcctaactatttttataattcagggactgaggggcaaaggaaatccatgccagttccgtgactctgtgttgaagatgtataactttgccattaaccaagactgagagaagaacgtgtcttcaagaatccaatatagttttgacttttccagaagcttctattctagtatgatgcaaagaggttgtattacgttaattaaggaaacacatttcctaacttgctttgagaccctggaggggaccagaagcacagtccggctccccttgccctgtgtgtccctgtccgctccacttgacacctgccccactgtctgcctaggctgaccaaaggagaaatggaacactcattattccaccggcaaatggagtcatgggataatgcccaccctattattcatgttccacagggaagggagagacacctgcacagtgttggacggaattgggtttgatccgggcctgataacctgggcctaattaagtccttcatttaagcacattctgggattgggatgaggattaagtgaggtaatgtacattacatacctacattactttacaatgtacgtaatgtacttcgtaattaatgaagaacctagggcttcataatgcagttaaattggttcctttttcctcctgcctcattcatttgcttctactctttgatgagtgcagctaggtgctaggcttggttccttgggtagaaatggaaaaaggaggtcacagcaggagtccaaacctcatcctttcttcaaattaagttgttggagttttccattgtgtgggggagttgttttttgttttttgttttttgttttttgtttttcctgacaaagcctttagttcatgaacagttttatgtaagggaagtgcatctaataacataagcttggtctcagggacttccagcttcagagcagagtaatgtaaaatgaaaagcaaaacaccaggcaaattctgaggagcaaaggggctgtggcgttttacaatcagagaagtcatcattcttgctaaaagttatttgtgtataatgtgcttttgaaacaggtctcctgacttttatgaagaagtgaaaattaagctccccgctaagctcacagtaaatcaccacctcctgttcaccttctaccatatcagctgtcagcagaagcaaggagcctccgtggaaactctcctgggatattcagtgagttgtttccagcctgctgactcacactgcagttgttggtgcatctgaggtccctgcagagataaacaaccaaattctattcacttgattttttccagtcagaagtagcaaaacatgctaagccacattatagcaagaggcagaaatgatttgccttagcaaatgtcaaatttcaggaatggaaagctagcgggtgatagatgttggaagaatactcatctgttttttaaaaagcattgcagtgttcactatttccaaatttaatatccatgcttcacgtatagaactagctttgtcccccaagaagaaaccattttttctttaaaagatataaaaggtgaaataaacattgatgttgttcagacacacacaaacattggctacagagaaaaatgctactgctttagctccaaaagcaataaatcatcaatattaccatttcaggaggtctcggagatttaaaatgcaaagaactggacagaaattactgccaaaaagagtactggtcaatatctactcactgtttagttgcatttgattattgcgagctagataaattatcagaattatatgctgtaataaataccactttattatttacatcatctgtttcagtggctgccaattctcttaaatgaacgtcttcaaactggatcctactgtctcccagttgccttggaaaaattgccacccaactactccatgcattctgctgaggtaattggcaagctggccatcagctgtttcttgtccagctgtagtcttggaccaccttcccagactcactttccattcccatgtggccatggatgttcatcatgttctcagagagcacattgttctgataggatgggaggaataactgactgtgaaacctcattcttttaaatgccaccaaatcagaatgttcagtagacgcaacctacacccaaggcagcataaccttgcattatctaccacagagggattcccagaataatgtattatagaagaggaggcaaactaaggccattcatagtaaacaactgttcccatcaaggatccttataaaagattcccaggccagattcatccgtttctttcttgggtcagttgtcacagccctccggtagataccaaggtatttattctcctaccaatcccaatgccaatagcctttcccacttcctgtttctggcactttctcttgctcatccactctgctgcagtgcacccatttaaagagaagcccaggtggatcaactgaggtcaggatttcaagaccagcctggccaaggtggcaaaaccccatctctactaaaaatacaaaaattagctgggcctgctgttgggtgcctgtaatcccagcactttgggaggccgaggcaggcagatcacttgaggtgagaagttcaagaccagcctggccaacatggtgaaactccatctctactaaaaatacaaaaaaattagccgggcgtggtggcgggtgcctgtaatcccagctactcgggaggctgaggcaggagaatcgctttaacctgggaagtggaggttgcagtgagctgagatcacaccactgcactgcagcctgggtgacagagtgagactccatctcaaaataaataaataaaaaataaataaagggagcccaggggactgtccaccctgactgcaccagctgtcacactgctagcccacttctcagttccttgcataggtttacatcaataagtattattttgaagtaaatctcggacatcatatttcattttagtctgcatcttaaaagataagggatttgtttttaaccatcacaataccattgtcatactttaaaattttaactgtaatttcttagtatcatcaaatattcagtcactgatcaaatttttaattatcccactaatgctatatttttgacgcttgctttttaaaattggtattcagataaggtccacacactgatattgattgttacatctctggagacgcttttaatctacagatcctccatctcttttgctttccttgcaattttaagttgaagaatttctcagaaatttgaatttaatttcaaccgttccagtcaactttcttctctgttctttcgccatctaccgtctcacttccggctgttttcctcttattttcttttttccttaaagagagaaccaacttttgccctggaccacaggcatgtgtctggtaaaccaaaacttctctcatcaaagccatctaaggggcaatccgagtatgtccacagacatttccctgattggtctttatgatttggacatcaacacctttcagtatccctcaaaaccaccttcttatcatcaagttgcacactctaatttcttagaaccccctattatctttttaagctataggaaagacctgagtgttggagagagacaaatctgtgtccaaagtctagattctgccactccctagctgtgtgaatgttggtgagttgcttaccctctctgagtctcgaagatgaaactgagcccatatctgcatatctgcctataaggttgctgtaagcattaaatgagataatgcttgccaaacaacaaactcaattcctaagtaaacattaattcctttttcttacttgcgctatgctgtgtttatagatatacccttagcctctcttagtatcctttaaacctgcactgtctgataagatagccactagctgtatgtggctattgaggaaaatatggctagttcaaactgagatatgtgctataagtaaaatatgcaacagatttcaaaaacttcatggggaaaaatgtgaaatattgtattaataattttttacattgattacatattgaaacagtctttaggctgtattgagttaaatgaaatattactttcacatggtccttttgtgtttttttttttttttttttttttttagagacagggtcttgctctgtcactcaggctggagtgcagtggcgtgatcacagctcactgtaatcttgaactcataggctcaagcagtcgtctcacctcggcctccttagtagctgggactataggcatgcaccaccacgcccagctaattttttttttttttttcattagaaacagtgtcttgctatgctgctcaggctggtctcaaactcctggcctcatgtgatcctcccactttggactcccaaagtcctgggattataggtgtgagccaccatgcccggcccctttttacttttttaatgtggccactagatgattttaaattacatatatagctcacgttatatttccactggacagtgctattttagatcacagatggcaaactcaagtgcccacaggatccagatgagtaacataaatgaatgccttgttctggtggcatctgttcactctggagattgtctcttccccatctgaaggtcacagctgttctcttcactctgcagattggtgacatgctgggatataaggccaattttttcatttcttccagtactcaaatgaagttagaaaagcagtcttttataggaaattttcaggctttcaaatattggtaattaattttttaaagttcctaatacttcaaacagaacgtgtgtgtaggctagagcccactttgggccccagcttttgactgcttcagatagctttaaaggtctccatcccctgtacacatctacctttcattatgatgaaagacatacaaacctaggcgaggccctcactcaacactgcaggacatctctaaaggaatgcaatttcaatgggaatttaaggcaagaaactgtctgtaagacctacgaaggtaatgatatataaacgtataaaagagtcactttgagtaattaaagcaggagccgacctggcctagaaacatgtgggaaacacttggaaaaactgtggtgaaagggaaagtaatatcgggtactcaaaagtattaaaatttcatgtcttgtaaagatattctatactttgtcctgacaattctgattaatggggaaattgctgggatcttaatttattttaattcctagaatccagaatcatcaatgctggtttggaacttagagacagattacaccgttcagccctcttctcacagcatgagaacagaacactaaggcccagaaagtttagttgagtcgtctaagtaaaaataactagtttgaagcggggcacagtggctcacacctgtaatcccaacattttgggaggctgaagtgggcagatcacttgagcccagaagtttgagaccagcttgggcaacatggtgaaaccacatttctacaaaaaatagaaaaattagttgggtgtggtggtgtgtgcctgtagtccccgctactccagagactgagacgggaggatcatttgagcccaggaggtcgaggctgcagtgaaccgtgattgcaccactgcacttcagcctggcgacagagtgggaccctgtctcaaaaggaatgaataaatacataaatattaactagtttggtgtagaattgaagttgaatccagggctcctgactccaagaacagttagattagttttcaagagagttctgtatttgtataaccctgacatttccagtcaagttggtctgcattgcttgttagtaatcagaaaagggaattggattgctaatcttttttttttctctttaacacagaaagtcccattacagaatcctcccattaagtgggctgaaggacataagggagtatttaatattgaagtgcaagctgtttcttctgtacacacccaggtaaggaatgtcaaggttaatcatgaaggtaaaggtgcagcggaggagcctttgaaggacaggccaataaaagatcagtgaaaatccttgtctacagataaataaaaaataaccctttagttctttgtggggacatgcaaacctctttaggtttcatttgtcattggaatagaaagaccttacaaaaccgccgagcacctaaaggaaagaacctagtatctgcactgttggtggagaaactttgcagggggacttgatttgaaactctcatctgctgttacttcttttccctctgtaactctgccactttgccagcttttaaaaagaaattccgtactctctcctttacctgccactgtctgagttctgcatctgctgagacctctctcttggcagtatgcttacctggtacgctgacctctgcttacagaacatgtcagagccaaaattatttcttctttagctaataattattgaaacgttcaacttcatgcaccacattctacaaagaagttcatagcctcggtctgaaacatcatgtcttagaccttctggtctgaaacgctggataagaggttctacccataaagagctattcgattgtgtttgtgaatccactggtgaacattgatggtataaaaccccatgaggcctgccttctcccttcgcaggacaaccacctggagaagttcttcaccctctgccactccctggagagccaggtgaccttccccatccgcgtgctggatcagaaaatcagcgagatggcgctggagcatgagctgaagctcagcatcatctgcctgaactcctcccgcctggagccgctcgtgctcttcctgcacctggtgctggacaagctcttccagctgtccgtgcagcccatggtcatcgctggccagacaggtatgaacctgcagggctgggctgggaggaggcaggagcaagcaagcattgccttctttaatgaaaaatgactttccagaaatccagagacaatgtgatcttcctttccactgatgatgtgtgctcaagggaggccaagtcttatgctattttttttttgagactctctgcatgttggaaagaaaaagaaacattaaaatagggttcttaatattatagctttttgtaaactttattaaatgattataggcagtctttaaaattccatttctggtaattgatgaatttattttaccttgaagatatttttgttttcttgactaacaggaaatggaacattttaaggtaagacaacctgtgttaaatggagggaaggaactctctacattgaaatgcaatgcaatcaatttttaaagttaaaacataaactcactattttaaagtgtatagttcattggtttttagtatagtcacaaggttgtgcaatgatcgctacaatctagttttataacattttcatcacctccaaataaaaccccatcactccctattcatccctccccctagaactcatccgttctctcttacagtctattttaaatgcttacttttaacaagttaacactaaatacaatgtgtacattttcccttagaaataatctcaaaagcttatcctggaggcatgaccagagtccagtggttctcctaactcttccagggtagactggctggtatagggcatctttatttgccaccattttcagctgtgcctatatagctctttgctttccagtccagcagacgtcttttgggtaccatccatatgcccagtactgtactaaaagttgtaggctttgtgacaataaccaagagcatctcagacctcagaggacttataatatggcaaagagtcagcagcacaggacaagactcctcaaagggacacagctaaattttgcagtggttgtggggagggtggtatcaaaggagagagtgagaaaacatccatctgggaggatgcaggaggtccacataaagagatggccttgaagaagggatagagtgaaaaccgacagaataggggcaatgagatgagtgcagcactgcagagaaccagaaaagtgtgggagtgtcaggaagaaagtcagtagcacagttggtggtggaacagaagcacgtgtggaagtgggctgggacaatgaagtgagacggcttttagagccagggaggggcatgtccccttaatctctcactctgctttgcaccctgatatgcatcttctgtggttccacagatcaaacgtcctgtgttggaggctaacttttcatccatgtagcagttgcctctccagctagattcttgcagagctctgccctccttcgattactttctgtgcccccgcatatgtggcacactgctttgtatgttccagctagttaatacagacttgttcaccagacaaaaatatttatatgttttgagcagcttctccatagcaagttgccaccttgtggtgtgaggaccacagggtgttggcataggcagaataagtggaggtggctagtctacaagcatttattcagaacctattctgtgtctctgcaatggaaagcacagtgggggcacaaaagatgtgagaaatgcacttcgcatgggaaggattccagctttcacagacagacagtttaccaccagacatggctggagaatcatgtaactcagtttcacttgagccctgtactgtgtggagtcagacggcttcatggaggaggtgggacttgtgctgagattcacagggtcggtatgattttgtggatgggagtgaggagggcttcctaggcgaggacaacagcatgagcaaagtctcagaggtaagagagcaggcatgatgggacaatacaatgactgcctcattttaagggatgtcgaactgagccaaaaagggtacaaggttagataagtatattggagccaaactatagaggcttagggcaccagaacaagaggttctatgcagtaaatcaaatgtgtatgggcccactgtgggaatgacttgatatgcagacatttttaggttaatctgtacaagaatcagggttgtgcagcacatctcaaatcatagtgtccacaacagtcacgtgagcatcttgtaaagatgcagaacctgattaatacactctctggggtggggcctgagattctgcatttcttagtagcaagcaggtgatagtggtcgtgtgtgtccgcagcccccactgagtagcatcagtttacaacctggcttagagaaggaggacgtctggacagtcttatgtctttgtcattaaaaaccatcaatgctattcagtggcaggaggaggaagttcaaaagagggaatgtggaggcatctgtggtactcagagccagcatgccagagctcaccaaaaccatctacccttcccaggcctagttaaattggtcagcggtcaggactcattgtcactgtcctggagaaacttccacctcaggctccttaaggaccagctgtgggactacccatttttctcttggttcctcagccaacttctcccagtttgccttcgagtccgtggtggccatcgccaacagtctgcacaacagcaaggacctgagcaaggaccagcatgggaggaactgcctgctggcttcctacgtgcactacgtcttccgcctgccagaggtgcaaagggatgtgcccaagtcaggtagagttgccctgagtgtgggactctggtgggcggggcaacaccacctccaccccactgcagtgtaatccaaaataaaacatcctatgctgggtgcaggggctcacatctgcaaccccagcactctaggaggctgagatggcaggatcgcttggagcagtggctcacatctgcaaccccagcactctaggaggctgagatggcaggatcgcttggagcagtggctcacatctgcaaccccagcactctaggaggctgagatggcaggatcgcttggagcagtggctcacatctgcaaccccagcactctaggaggctgagatggcaggatcgcttggagcagtggctcacatctgcaaccccagcactctaggaggctgagatggcaggatcgcttggagcagtggctcacatctgcaaccccagcactctaggaggctgagatggcaggatcgcttggagcagtggctcacatctgcaaccccagcactctaggaggctgagatggcaggatcgcttggagcagtggctcacatctgcaaccccagcactctaggaggctgagatggcaggatcacttggagcagtggctcacatctgcaaccccagcactctaggaggctgagatggcaggatcgcttggagcagtggctcacatctgcaaccccagcactctaggaggctgagatggcaggatcgcttggagcagtggctcacatctgcaaccccagcactctaggaggctgagatggcaggatcgcttggagcagtggctcacatctgcaaccccagcactctaggaggctgagatggcaggatcgcttggagcagtggctcacatctgcaaccccagcactctaggaggctgagatggcaggatcgcttggagcagtggctcacatctgcaaccccagcactctaggaggctgagatggcaggatcgcttggagccagaagttggagaccagcccagggaacataatgagactctgtctctacaaaaaatataaaaattagcagagcatggtggcacatacctttagtcccagctactcaggaagaagctgaggcaggaggatcatttaagcccaggagttggaggctgcagtgagctatgattgcaccactgcactccagcctgggaaacagagcgagatcccatctcttaaaacaaacaaacaaacaaacaaacaccctaaaattccattttcgttttcaggacaatacaaaacttacatgaatgctgaaattatgtgtttctttatagatctttcttcctccctccttgcctctttttatgctctaaacacttattttgtctgcccatttgataatccctcactggtctttacccacttgctaatttatgattcagctgagaatctcttttttaagatggagaagtggtgactgatgcctacgattctagtataataaaggaaataatatata

SEQ ID NO: 15564 - DNA, 31654 bp, Homo sapiens
ttttgtctcctgtaacaatttacgcgccgtgtaactgtgaatctttcaaaggtatgttttactggagtgatttctggttatttcagaaggataatttgtgtgttgcgtcattaatgaaatagtagtacgaaaaacctatagcatcttttactgcaggaggtaactttccatgccattttttcagaaaatctacttatgacttcagtggcttgctagactggcctttttatttgtacttttcctgtgtttcagaattgcagagtataataaaggcatgtcaagtgcatattgtgtccattttcaggtatattagataagctttacaccaagataaattagatatgcttattggtttaatttgtgctaatatatatttaattgaaaaatcaaaaaaatttttttaaattgactgaagttgtattccaaaacatgcaaaatttagtttaaaatagattggatacacttttaaattttaaacaaggtagagggtttagtgctttgcttttttaaaaagtaaatgaaggctgcagctttctgcagtagttgtcttgggaagtagtgtggacatcactcctaagagacgttaaggaagtttagctaacaggctttaaccctttctctccataccagcttttactcttttttttttttttttgagatggagtttagctcttgtcacgcaggctggagtgcaatggcaccatctcggctcatcgcaacctctgcctcctagttcaagcaattctcctgtagttcaagcaattctcctgcctcagcctcccgagtagctgggattacaggcatgcaccatcacatctggctaattttgtattttgagtagagacggggtttctccatgttggtagggctggtctctaactcctgacctcaggtgatccgcccgcctaggcctcccaaagtgctgggattacgagcatgagccaccatgcccggccaccagcttttactttaatgccacagccttaaattttctttcaggagaaattattttatgtaaagttacaaaggaaaataatgcttaatatctgtaagcattcgtttggtaagtttgctgcctcctcagtaagttttgatgaaagtgaattttgatgaattactaccttagccgggtagtgacgttaacatgtggcttagctgtccattttctaagatatcaagaaaccagcaacaataagtaaaattgttaaattatgcaagaatcacatgttcctacctgtcatcatttagtcttggttctatttgcatgtgaatatcctttagaatatattactcccagttattccgctttacttttctgaatctcttttcccatctcttgacttcaacttcagtatatggctcttgttccttctacctggagaacggaggcatgtggaagcccagaggattgaattcttttttttttcttttctttcttttctttttttttttttagatgaatagtctgcttaggaaatccatctccataatgtttacctggtatcgtgttgtaatgtcagaatgaagtggctgttcttccccttgagtcatcgtcccgaatgaaggttccccaaaagaaatcatcaacttatgtggtgatttccttttacctttaaaaaaaaatttcttttcatggaaagataatggaacatgtcggtaagattcatttctaggaaggcaaaggagtagtttatcatctaaagactctcaacctaaagctgttttagaaaactttccttaaaatgagaagccgtaggttttcgttgcattattttggctaattgaaaaataagaccaagtgcgttctgaccttcgtttctcttacctttatttttacaaccaccatttcaatggcccacttgctgatacaaatgattgtttaattttaaaaagcatttaattgaagtcaagttatttagaacctaatcatttacacgtctttgttgttgctgctgttttgcaagagtgaagagcttggagtcaggtgaatctgggatgaggtacagttgtcatttattagtcatgtaatttgtgacaagccacttaatctctctgaagacttcagtttcttcatttgtaaaattggcataataatgctgtccctagtagggaatatagaattatataatgggtcctttgtatatattggctagtattgctctcttacgatttggcactatggagacactgtgggagattaaaagaagatgatgaataaaaggtgacttcagctctgaagggctttatgatccatttgggagaacaggtaatgtagaatatactggcttcaaaagtggcaggtgtttagaagagaaaaggatacatgatgtgataggaggcaaaggcttgattgagaaggctgagaagacttagagtaagggttctcagccctgactggacattaaaattatctagggacaattcaatcagaattcctgggggtggggaccaagcatcagtattttaaagttccctggggactttaacttgaagcccaggttgagaatcatttaaacagctctgttatttatttatttaaaattttaatgtattttttgagatggagtctcgctctgtcacccaggctggagtgcagtggcgcaatcttggctcactgcaactcctgcctcccaggtccaagctattctcctgcctcagcctccccagtagctaggaatacaggcgtgcaccaccacaactggctaatttttgtacttttagtagagacagggtttcaccatgttggccaggctggtcacaaactcctgacctcaagtgatccacccacctcggcctcccaaagtgctgggattacaggcatgagccactgggcccggcctagttttactttttttttttgtaatggaatttccctctgtcacccaggctggagtgcagtgatgtgatttctgctctctgcaacctctgcctcctgcgttcaagtgattctcctgacttagcatcctgagtagctgggattacaggcagctgccgccatgtctggctaatttttgtatttttagtaaagacggggtttcgccatgttggccaggctggtcttgaacttctgacctcaggtgatccgcccgcctcggcctcccaaagtgctgggattacaggcttgagccactgcgctcggcccatttaaaaaaactttaaaggtagacgtattccaaatggggggaatatataaagaaaggtaacacttattttgccctgtgtgctttgaatttcagaaggtgtagtaagcaaagaccacttactaaccctacagatatatccttagaaaatacagtggtttctgtcataaatctgataaatcagatgagaggaagggtgtatgtttgatgttgatttttctttttgttttattggggtttttaaaaactataaatatcaggtctgatgactatgtgtataaacattttctaagtagataaaatattttcaaattttgcattttttagtatgaaggggatccatcatttgaagttggttttctagatgtgatgataaacttgtcccaggtctatttgacactcctaccaaaatcctttgtgaccagggctagaaggcagctgtggctagtaaataaccctgtgtgtagactcacttattggctttggcattctctattgccacagctgtgtgaatagattaaccagagaccctctggtgccagccacctattcaggcaaacaagtctataatcagtacctctgttaaaatgaaactgtaatatactattgtcttttcatttatttatttatttatttagagacagggccttgctctgtcgcccaggctggagtgcagtggtacaatcttggctcactacaacctccgcctcccaggctcaagcgattctcctgcctcagcctcccaagtaactgggaccacaggcgcaccattgcgcctggctaatttttgtattttttttgtagagacggagtttctccatgttgtccaggctggtcttgaactcctgagcttcagtgatctgcctgccttggcctcccaaagtgctgggattacaggtatgagtcattacacccggcctattttctgattgttcaaagtagaagccaggcacaatggctcatggctgtatgtaatcccaacaatttgggaggcagaggcaggaggatagcttgaagccaagagttcgaggccagcctaggcaacatagtgagaactcatctctacaacaaagttaaaaagaaaaattagccaggcatggtggcacatgcctttagtcccagctacttgcgaggctgaggcagaaggatcacttgaactcaggagttggaggctgcagtgagccatgattgagccacagtactctagcctgggcaacagagtgagaccctgtctcagaaaagaaaagagaagagaggagaagagaaagagagaagagaagagaagagaagagaagagaagacatacaaaagaagagtaacatacaagagaagagttaggagaccctgtctcagaggaaaggaggggaggggaggcgagaggacaagagaagaaagagttaggatctatgccctaaggaagtaaggaggatttgagactgtgtaggtggttaataaccttaagctacatattttatggagggaaaaatcctatttttaaaagtgagaatagaacaattttgaagtgaaatggaatgaattagctggaccataacggctctgactgaagaaaaggatgtaaaaagccacatcctggatatgtaccaaacaccatggttacatggcatgtttgtatatgtaacatttatttaaaaaaaaagtctcatagcttagaaggcatttatttttgttatgtgtataggcttctgtgcaataaagcagccttttttattttacagctcatgatgacttaaatggttaattgcctgataaatatggtcctcttttattcttctgattctgttgttcttttgcacttcatctttcaaggggttgggctattcttaggtttcactgattgcactggaagggacatgacggaaaatgaagatctcaagataattttcttgcaaattcacaatggaagataaaaggaaagagtggcaggcattctgcacacagagcagacgtttctttattgtcattgttcagcagaggaatcaactcagccttggtgaaactagagtgatgcccatggtggcatgtcagcatctccctcttagtggcatcagtgctagattgttgttgttggaagcaggagagtgtttagtccataaagtacagaacttcgatatcacagaagctagaagaactttactgccttcagcttcgtttaaagatagtagagagcttactcattcgttttagaaatatgtattgggtctctatgtcaggaactgctggcacagcagtgagattgaagatacaacagtgaatacaatagagggcctatcctcatagagtttgcctttcagaatgagggacagacgcagacaaatagaaaatgtcgattgtgtcagggagtattgagggctttgaagaatgaaatcgtgacccagaagagatgcttttagattggatcatccgtgaaggcctctatctagaaaggagacacttgggcagaattctgaatgaacttgacggacatctgaaggaaaaatattccagtcagaaggaacagtacgtgcaaagtccccaaaacttcaataagtgacgtgctccagaagcagcaaggaagcagaatgaggcctgaacagagtgggcagtaggaaatgcagtcatagagaaagcagggctgggtcacaggcctcagagactgtagaacattggctcctactctaagacaggaagctgctgtgagcattgaggttgggcgtggaaccatttgactttttatgaggatcactctggctgcagtgtggaaaatagactggacgagggagggcagttaggaagatgtcacggtaactcaggaaagcaataccggtgctttggacgagggtggtggcagaagagaaagtgagaagtattctggatatatttcagaagaaagtggataggattttctgatgggtgatatgtagagtgtaggagaaagagaagaagcaagattgactttaatgttttccacctgggcaattggtggactggaattgccacttgcagaagtgtggaggtatggaaggtatgggaagagcagattgccaggaaagttgagttagttttgaactcattgtgtttgagaggtctgttaaattatcaagtagtgatgttgaggtgtaattggaaaagtcaacctggaatttatggcagaagttgaggctgcagatataaacttgtaattttaaaaatgtatatttaaagccatgggagtgaatgagttcatttgagattgaatgcagattgagaagagatttagaattgaactccagggcactgcatagcaggaggaaaacctagtaaaagtggtatctgtaaaatagaggaacgaactgtcacaatttgcctggtactgaggattttctcagtacatgagactttaagagactgggacaccctgagacaattggttgccttccatgggaagaaagtatgtcaagagggagagagtgaacaactgtgtccaataaaccaggactgagcaaaaaccattgaatttggcatcatgaagtcttaggtgactttgacaaggcttgtctgttgtgaacagccaagtaaatgtgaggaccactctccaaaaggtaaagaaacatgcatgaggatacaggtgcgccagctggagacatcatgcctcttccccgtccccaccaggagtggcgtgaagcctccccagtgctgtaacgaggcagccaggtcctgtgtgactgcacatgtgacttggggcaagtcatttaacctctctgttttcactatcctatttgtgaaatattgtttagatttgtggtttgagtcagctatctgtatactacactgtgttaggagctatgtagattaattttcaacagatatggttctggggttgtaggaattttcaatttgagaacaaattgaatcttaccctttgtcaggagaaatagcctttgacatgtgttaggggcaagggaaatctcaaacttgcttaattttaaaaatgaatatttggttgtggataatttaagctttggtgatatttctaattattttttgtgtgtttctagtctactgaccagaagtctgaaaaaaacaactaaaaagaaagactgcataagccttcactagagaagtattgaaaattgcttgagggaagtgacggtttctttagcctagtgtctgtaggaccccagtgtagtgtttgttgaatgaatgaaaggaggcgtatcagtcaggttcactcagagaaacagaagctgtaggaaatccatatggatgtgtgtgaaggtattggcttgcctactgctggtgtgtggctaagcgagcttaaaagtccgcagggcagatagtcaggaaggaaatattcccaacagactgagctcccttgggcacaagctgaagcctggagtctgaactgccagagagcctctaccttcttagaaaaggcttcccactggctaagtcaggcccacccaggggaatctctcctttgattaacttaaagtcacctgtttagggactttaattacattggcaatagtcccttcacagaagcacctaaatgactgatgatgtaactgaaaaaatgtgtgtgtatgctacaaaatggctgcagtctcccttctgtcctccagctcttgcaggagaactctcttgtagctcaccctgtctgaaaacatactggaaaggaattcaaggaaatgtagttcagcctagccacgttgacacatcatgaagccgtcacaaaaggtaaagcctggtttaggagcatttgcatttgcagtcttaagtatttttgtcttatttttcaaaaggggttgggcacggtggctcacgcctgtaatcccaatactttgggaggccgaggtgagtagatcacttgaggccaggagtttgagaccagccaggccaacgtagtggaaccccgtctccactaaaatgacaacaattagccaggcgtggtggcgcatgcctgtaatcccagctattcaggaggctgaggcacaagaatttcttgaacccaggaggtggaggttgcagtgagccgagatcccgccactgcagtccagcaacggagtgagactctgtctcaaaaaaaaaaaaagtagttttggtttttaatttttgattttttcttatgttattacatataacgaatgatatgcatactctgaaaaatcatgacataaaggtgaccttgaaattactttgatgttcatttaaactagtctttggtctccactggctaggagaccacatatagcagaacagcagagaaagcaaaacagttaattttcatgtttggcttttgagcttccagggacccaagtcttgccttgaaccgatcttaggaaattcctcattccctacccgaccctgtttctaaactgcatccctgctgaaatgcaatgccactgtaactctctccaatatttgttttcttctttggcttaccactagatgtatgtatatatgtttgtgtgcctgtgtgtgtgtgtgtgtgtgtgtgttgactgcctcatagtaaagcctactcttgagattaagactcctgatagtttagagaacagaaatcttttttagttcctggttattacttgaatttgcaagaggaacaactgctaggaggcctagttaacagtagttagggtctccacccacttgccaagggcaagactagtttacaccacatttggaatgaccagtttcctcccactttagtttcagtgtagaaagagtaggggagacgaactattcaatgtcagcttgggtgtagtgccagaaccgtactcagtaatgctgtcattgctgttggtgcttaccagctcttcagtactggaatagcttcagacctcgagagtttatgactttatcatcaactgggtgtgttgcccttggcacattgccacacagtgcttaatgatgatatatgttctttatcaaattccccccaccaaataatggcattatttacgtgtgagaaagttgcacatttcaccacctcatggtttattagagtgcaattccgtgagaacaactgcctgtgatcctctgtatccccagtggccaactcaggagctcagtatgccctacccagtagatgctcagaacatcattgctgagtgaggaagtcagccatcattttctccctggatagtctctcctgtagataacaggggccgttatcagccaggtttttcatcatttgtggctttgaatttcagggacatgacaagtttgctttttgtttcgttttgttttttttttttttttggttttctagagacagggtcttcctgtcactcaggctggagtgcagtgatgtgatcacagctcactgcagcctcgaactcctgggctcagtgtttctcccatctcagcctttggagtagccagcagtataggtggtgtaccaccacacccatctaactttaaaaaaaaaaaaattgtaaagacagagtctcacttttttgcccaggctggtctcatactcctggctcaagcaatcctcctgcgttggcctcccgaagtgctgggactgcaggtgtgagccaccttgcctatccaacatgacaagtattattctctggcaggaagtgaaattttttctcactgatgattgcacacaaatgtcatatctccatgaggcttctactcactagttttacggctcatgtcaccttgcttcaaactatgcttcagtataattttgaagtgtatatttccattgcctctccttgagtaattgatattcttcacaataagtttacatttattatcacttttatttacttactattattactctgagcagccaatcttatgagaagctcagagtggaacgtgtgggtcctggtaaatatattatttgactcacttccaaacacacttaatattgcctggtgttttgattatttcaaaatatacagatttcttgaaaggcctgcaaaaggaaacaatcaaaattatagcggttaagaatgtgagtctgccttggtttgaattccagatgggccagtccctagctgtgtaatcatgggaaaattattaaatctctagcctcgctttcttcatctgtaaaatgagcatacaggctgagcatccctagtccgaaaatgcaaaattcaaaatgctccaaaatctgaaactttttttgtgcctccatgacgccacaagtggaaaattccacacctgacctcacgtgataggtcacagtcaaaacattgtttcatacacacaatacttttttttatttgtataagtttaagtggtacaagtgcagttttgctacatgaatatactgcatagtggtaaagtctggacttttagtgtctccatcacccaaatagcatccattgtattcattcaggaatctagcatccctcaccccctcccatcttcccacctctccaagcctttcatgtctagcattctgtgtccatgtgtacacattatttagctcccacttctaaatgaaaacatgtgatatctgtctttctgtttctgagttttttcacttaagataatggcctccagttccatccacgttgctgcaagagacatgatttcattctttgttatgactgaatagaattattcaggcacaaaattattaaaaatattgtttaaaattaccttcaggctatgtgtataaggtgtatatgaaacataaatgaatttaatgtttacatttgggttccatcccgtggatgtctcattttgtatatgtaaatatgacatgatatgaaaaattcaaaactctgaaacaccaattgaactcaatttgcagtaagaatgcatacctcacagggttatagtgaggattgaatgagacaatcctagtccaatttctttgcacatagtaatgctcaataattattacttaaatgggtataaactttatagtaatgaggttggggctggaaaaaatgcagtttcataatttcctatagaagtcattcaatcctgactctaaactctgtattccatgtggtggttgggtggcgtgggagagtcctctttatcctgtggggttggtcctatggaggtgtctgtggcagattggcagatgcatttgtcttgtgcatagatggtgtctgttgtttcctctggcagagttcaccagtgtcctaatgcaaacttagtcctcatctggctcctgcacaggctgatctctggctcctttagcccctcatggttcctgttgtttcattttcagagggacccttgtaaggactatagtcctctcttcagctgaccttcaggtccccagtcagaaccaagggaaccgactctgtcccttctcatagcacctgaaaaccccgggaaacgaggggaatgctttgctctcagctactgaggttgtcctgtcaccttctcttctgccctcctttgccatggcataggataatgtaagtcagcaatctcattactcggtatatagccagaggaatataaatcattctaccataaagacacacgcgtgtgaatgtttattgcaacactattcacaatagcaaagacatggaatcaacttaaatgcccatcaatgacagattggatgcagaaaatgtggtacatatacaccatggaatactatgcagccataaaaataatgagatcatgccttttgtgggaacatggatggaactggaggctattatcctttgcaaactaacgcagaaatagaaaaccaaatgctgcatgttctcacttataagtgggagctaaatgatgagaacttaccaacacaaagaaaagaacaacagacactgtggcctacttgtgggtgaagggtggtaagagggagaggagcagaaaagataactatgtggtcctgggcttaatacctgggtgataaaataattgtacaacaaacccccatgacatgactttagctatgtaacaaaccttcacatgtacccccaaacctaaaagttaaaaaaaaaatcccagacaggaagtagggcatattttgcctaatttgcagcttcatcctcactccctaacttacgccactcatgtctcctccatcatcagggacagcaagagtggggaggggacgaggcctgccacatctccattctctgatcttatttcctcttgcctcttcaacagcgctttgtctctcctctccagcttgaagcccttactctggtatgtgatttcaaagcgatgaaaaactggtttcgttagtacttcccttggatctgcccttgtctcccatcaaggcagtgcaagtaaagaatccaagatatttgttttgttggtccactggagggtagagatagagaaaaacagtaacttccccaccacccccaacctcccttgggctgatgactccaaagactgccataaatgaacacttcatagagctgctattaatatgacacaaatctacttgatctaagggattcttttactttcttagggtggtcattcctaagtctttggatttcacagaaaagaaaatatattttaattgaggactgacaaaggttgccaactttttatcaattataagaattgtttttataattaccatcaatttctattatttcttttactccccctctttccaactgtggaaggtaaaattgaagagcaaagaacacttatttcaaagtgagtaaatttagctatatgaaaactcagcagattgccctgagtttccttgcgtagctgcagtccagtggaaatttcttccagaccagcaccagtcgccccagtgacatttagaaatcactgccctggattgtttcagccaccgaaacactcggtgttcactgtcagctatgattatatatgaagtgctttcgagaaccaatgtatagcataacttaggccaaaagaaacactgtgcctaaacactcagccaaggagtgttgagtttgcctggatttctggaaaattgtctccgttccctagttcactgtatttgggtaaacaaaacatggcctcggagagcctttgcgggagaaattataaaaattcagcaaagctttgtgatctcattttggatctcctcaggattcctcatcaagttgcaattaaggagagaaaaattccgccttggggtgggattttaattactcatcatgttatgacttgactttctgtgctgcatttttttccatatcactacttctgtgtttgacagctcctccaaagagtcgctccgttttatgccaggagcgaagtacttactaagtcaaaggaaagcaaggcaaacatctactattgcctttgtgcttttaccagaaaactgggtgagaacctccttttccttttccctgcccctccagcctcagttttatgaccctgtggagccagtggactttgaaggacttctgatgacacacctgaacagcctggatgtgcagcttgcccaggagctcggggacttcactgatgacgacttggacgtggtgttcacgccaaaggaatgtaggactttgcagccctctttgccggaggaagggtaaatagttttctaaaatgtagatgtgattgggattgtcatgattgttttcaataagtgggtaggggagatgccttcaatctgaacttaaaaataaaataaaattactcaatccattcaaatgtgtgggacagctatatgatatcatcatgtaagtatagatagtttttaaattagtttggccagagattttgaaaagctatgtgaagactaagccagtgcaagggatgcaggaggaccaaatgaaatgctcaagaggaggttaaaagtgcaggctctggagccagaccacctggctgccagctcagtgaccttggctgtcacatgacctcccaaatcctcggtttctccatttgtaaaaatgtcaagatttttaataataattactgaaatgccaccatccagaagcattttaattgcttacagttatgagactggatcaagttagaaacataaggtaaacccacatttattgagcatctactatgttctgggtactgagataaaaagatgaataagtcaaagtccctcctttaaagaaagtgtcatgcagtgctaaaacagtggggagagctctgtagaataaatatgtgaatagctaattagggcttgagtttctatagttggctcttctatatgtttataggcttgggcattagtttttggcatcaaactaactgtggaattgtagctaaatgaaacgcctgttgcttctaaaatgtaaaaaaaaatgtctctttggaggtttaggataaacttttatttacatttattttaaaagccaaattaagattcatatcctcctggacaggttccatcttctcatcttccccagaaggtcccagaaagaagatcctgacacacagcccctgccctctttactctgagatattctagttctattttggattttatttcatcacagtttaaggaggttggatgataatgggctggtattattgtgaaccgttgctctcttgttcagacagtcctcactcacataggagaactgaccatatgtgtagctctgatgttttaaaaatacacacttcccaggaaagaaaaacattgtcatttttgggaaacatactcccccattttcagtccatttattcaggtatgactttagtataagttaacacctactatttcatctttagtgaagaatcatttaatttattcctttatgtaaaatttatggatgtttccaaatatggtcagaatcttggaaaaagctgtttaaaatgcttacagtagccagtcaccgcagcttgttcctgtggtcccagctacttgggaggctgaggcaagaggatcacttgagcccaggaatttgagttcagcctgggtaaaatagtgagaccctgtttcttacaaaacaaaaacaaaaaacagtacaatgaatttagaggaaggaggaggtttttttttttttgaaatttgataaggaagataatttctttacttagcatcagttttttagtatactgttgccttgtcaaaagaatttataggtaacatacctgtctgatgtctttaagacagcctctactatttcagttgttgccaaaaagtcttctgtataattaaggcaggggaaggtatcatcatcacaccagagtaaacaatagctgactcctgttgaacaacctgtgcctagcccagaactttatgttgagctgtgatggcgtggtagtgaaaaacatgaacgctacaggtgagctgcctggattcaggtccctgctccaccacttgctgtgtgacttggaacaagatccttaccatctcatttttctgcaaagtgagaataatagtaatgcctgccctatggtgctgattgagaattaactgaattaatacatataaagtgattgcctcagtgcataatgcacagtaaatgctacctaagtgtaaactattaatatcatatatgcgtcttattgtgtgccaggcagtcttctaagcactttgcacactaaccgatttaatcttcatcaaagctgtctactaaaaggggcactcttactactctaacagctttaaggagaggaaactgaggcacagaagggttgagtgactggcttatggtcacatagctataagcgatgaagctgggatttgggcaattagggcccagagactgcatgtgtaacctttacaatattttatctaatactaacagcatgtctctgttcttacctccttatcacagatgagaaaattaaggcttgtagcatttaagcctgtttatttctggtactaatgcatttgcaacaatagcaaaaagctttgctacaattgttatttttgatttcaagactctgaagcacttgaagagtattgctcatggtgcattccttaagtagacatgacaggaaccaactgaattaatgatcaccaacaaaagccagtgtttgcaatttcatcaaagcataagacaactgttctttttcctggctttcaaaaaggagaacacgcgtgtcctaacaaggttacacatgcataaaaaatatgtccaaattaccctgtcagagataggtatttatacttattttccttgttttgtattcgaatacagctagttctacctgtcttgtgtctgaatgccttcggggatagttataatttaacatgattctgtataataaagaaaacccacaaagcaaaaaaatgccaacatgtttgtctcatcaaagtaaaaatgtttattgccccaggaatacttcagacatttggaatgattgggcaagaacatcctaagcattctcactgataaggatttaaattcgtgtcatgttccttgctcatgattaggggttgttttgttgttttacccagtaataacgtgtttatttcattttctacctcattagggttgaactggaccctcatgtcagggactgtgttcagacctacatccgtgagtggctaatcgtgaaccggaagtaagttactttttttccactttttgtatataaatattaattttatattgctagtttttaaatatttcttaatactttgaacagttctaggtttacagaaaaattgcatggcaaatagagttctcatgtatgccttccttatccccactccatatcacacacacagttccccctattatgaacatctcactttagtgtggtacatttgttacagtagctgagccaatatggatatgttgttattaactaaagaccatagtttacattaatgtttactttttgtgttgtatattctatgggttttgacaaatgtgtaatgacatgtatatgcctttacagtatcatacagaattgtttcactgccctaaaaatcctctgtgttccacctgttcatcctccctccctggcaaccactttccttttttactgtctccataattccaccttgttcttcaatgtctttttgtggcttgatagctcattttttttattgctgaataatctttcattgcatggctgtaccattgtttatttatccattaacttactgagaaagaaagttctattttaaacataaagaatagactgcaagcttgcccaacccctagcccgtgggcaacatggagcccaggatggctttgaatgtggcccaacacaaattcataaactttcttaaaacattatgaggtttttttttttgcgatttttttaaagctcattagctattgttagtgttagtgtatttgatatttggcctgagataattcttcttccagtatggcccagggaagccaaaagtttgggcacctggaatagagcctttttgttgtcttctaattctgatgaattcccagggggaaaaattaagtgaattgaaacctggcctcagcttcagaggtggcattcgagtttatgaccaagaaataaattacttgctggccttccagtaagggatctttctctcctggattaatcaaaccttctgtgacattgttctgagctttttctctccatgccatggacctggacagcactctctcatgagaaacatctatgcacattgaaattctcagcctgcatgggtgtacctgttggggagtgagatgtggactctctacagattagggcacaccccactagagacacgtcacagaacctttgacaagacattagtagtttaaaattctgatagcctcactcctcctatacctcagtaagaattactattctatggggtaaatgatgaaagactttgaggattgggttttatctagctcctggaagggtgccattgagtttgtgctgaggttttctggagtaatgtcaatatgcacacattttcagcagcagaaaaagagaaagcattcattattaaaagttattaagagaaagttagatgccaatccatcatctgttctaaaatgaatggaaaacaaagtttgctgggcagtcagataaaattatggtttgctgataataaataaaagatttcagaacaagttgttctcaagtttttaaatgctatcattagaggtactttctggacattaaagatctaaaaaaaatctgagaaggaacaaatagaaagatccattttgatacatttggttttcagatttattttctatttcgggcttgtccactttttcatttctcatggcaatgcacgcttcttggagtagtgatttttcttgatcttgcacaaatgtaagagaaaaaaatgactctttttggaatactcgttgaaattttagaaataattatgaaacacaaatcactcagtttcactctagacagataatcatcatgaacatttgatgtctgtcctttgaatagtgttgggtttttttggtatatatttgcgtgaaaactaaataagattataatatcatttttgtaacatgcattttcagttttcacagtaaagagtgattctcttcctttgctattaaatatgcttcctcaatacaatgattgatgattgcataatatatttataccaaaatttatttaaccaattttaatatttaggtgattccttccttttcagtgttgtgcttaaaatgcaaaaacatccttctcaggaaaaatttgtacatatttatgatttttttctttggaattaattcctacaagaggaatttctatgtcaaaggatatgcacaaatttaaagatttggaatactagatcaaacattatgccgggcgcagtggctcacatttataatcttactcagcactttgggaggttgaggtaggaggatcccttgaacccaggagttcaagaccagcctaggcaatatacagagaccccacctctaaaaaaattttttaaaaaattaactggatatgatgacatgcacctgtagtcctagctactcgggaggctgaggcaggaggatcacttgagcccaggaggtcaaggctgtagtgagtgacgattgcaccactgcacaccagcccaggcaacagaggaagaccctatctcaaaaaaaaaaaaaaaaaaaaagccaggcacggtgctcatgcctgtaatcccagcactttgggaggccaagacgggtggatcacctgaggttgggagtttgagaccagcctgaccaacatggagaaacccagtctctactaaaaatacaaaattaaccgggcatggtggtgcatgtctgtaatcccagctacttgggaggctgaggcaggagaatcacttgatcctctaaaaatagctaaactgggaggcagaggttgtggtgagccaagatcgcgccattgcactccagcctgggcaacaagagtgaaactccgtctcaaaaaaaaaaaaaaaaaaaaaaaaaagattattgacactacatgcatgaatcctcaagaatattagatgttataatttatcaacatttccaattttatttgataaaaggttgtcttttttttcattttcttttactattagattaggcatctttcttctatatatttcttggccattttttatttttcctggtgctctgcttattcgtgaaatttgtgcatccctattaatgtatttgtctagtctgatttatttttataagcacttttttggtaaagatattaagccttgtctaccatgtattaaaaatgtcttccccagtatgccttttgtcttttaaagttgtttttaattttcaacattcagaattatttatgtcattaaatctatattaatatttttccttatgtttaattttggcatcatgcttaaaatttgattcacaaacttattattattttctaagagtatgggattaaagcattaatccagatcattagccacttgactgttgcttctgttcccttatgtgtctccatttgtttttatcttttctacagaagcaatggttacccatatatttattatatgcaagtttttgcatcttgttcccctaaaaaagaaaggaatatgtgttttaattttatgtttggcaacattctagggatgggattaccattggcccagttctctgcacccctgtgtaatggagcagttcccttcttaacggtcacctagtggacagggagaagtgtacaacttcagaactcattgtcagtttctggcaagctttcttgtagaaaagttgcatctctttctatccctctgcctcattctcttgcactctgaatctaacactctgcccatgaaaactaaaattcctagcacacactcctcccagggatcattctgtctctatatgcacctgtcgtattttatctgtggggagaatccagtacactattgccagatgtccttcatctcccaacctcacacagtacatttttagcttattgttttctgtgagttgtatctgtattgttttagaatgatggtagaaggagaaggacaaggagaaggtggtgattcatataaatgaaaccagctggaagctgtgatgctttcatagataagccactattatgaagaaggagacttcagatttctgtatagacactgaccagggactcgtgggcaggaaggtgtgcaacaccttcttatctttattcagtgagttcccctttggggagacaaagtttggtacatccttctctttccagctccatctgatccacagaggttctgtccagattcaggcattaagttatctcttcatttggatgagtttccagtttttctgtgtcttcataagtggtttactagaaagtcggaggaggatgcaataggggttgctggccatttgttaattagtgattaattatttagctctcctttaattggttatgtgccaaatcatgtatgattgttttgaaagaaatcaagtaatatggaggtgcattaaggaaaaggcaaatctcatgcctcactacttaccagtgtcctacccttcccttaactcactcttcactgcgtaaagcccagctgtgtagcttccagatcttttcataccctcacaaaaaatatttgtctatttatatttttcacataaagatatatgtattaatgtatgtacttatatattacaaacatttctttaaaataactgtccatgtcagagctatatcccattctactgaaatgctgcctagtattcaaagggtgaaggaatgtgtcctaagttactgaaactaaatgaccattttggttgtcaccatttttcataattgcaaataatactgaaacaaacatatctgcacatttgccccatacatgtgtgtgaatatttctgagggtagaaatgaagccagtgtacatggtatgctctgataggtactgccaaattcttctccagaaaagtcgtgctgtttcattccattaccaactgggcattaaactggcgtgttcccatattcttgccagtgctggatattatttattaaaataaaatttcagttcctccagtcttcttttagttattattttaatctggaagctattacacctactttctgaatacagtttcctatcaccaagtttcctttccttatgtgttctaaaatcccagttaaatatgcacttaaccatacaaccgtaagtcccactcttgagtatttacataaaacctatgtgcaaatacagcagtttagcagttttatttgtaattgccaagactgcatagcagttttatttgtaattgccaaaaactggaagaaaacccagattgtactcagttgggtagtagataaacaaactctggtaaatccatacaatggaatactactcagcagtgaaatggaacaaacaattgatatatacaacaacatggatgaatctcagatacagtatgctaagtgaaagaagccagacaaaggccgggcatggtggctcatgcctgtaatcccagcactttgggaggctgaggcaggtggatcacttgaggtcaggagttccagaccagcctgaccaacatggtgaaaccccgtctctactaaaactacaaaaattagctgggcgtggtggcacgtgcctgtagtcccagttactcaggaggctgaggcaggagaatcgcttgaacctgggaggcggaggttgcagtgagctgagatcatgccattgtactccagcctgggcaacaaagtgagattctgtcttaaaaaaaaaaaaagaagaagaacccagacaaaaaagataactgcatgattccatgtatctgacattctggaaaagatgaagctacagggatggaaaacaggtccatggttcccagggtctgggagtggggaagagggctgactacaaaaggacacgggagtgccctttgcgtggtgctgggactgtagtgcccatgatgtaaaatctgccttggaccattacattagaagaaatcaattccagttatcccaatattccctccaagtgaaatactttggtagcatatataataataattcaataagtattagctattatatttattaagtagtacctatcagaaaacatacttatattagcatgtcaaaggaatgaacacaaaattctctcccatatattgaacgcaccatggaggggggacctgccttcctctggaggaccatacttagtgaagccactttgccttataaggacatgcctttgttatccagaaccaagcagtcaaacactgatttagttagctcctttatttctcagttatctcctgctgatattacatttctccataatatctagagataggcttttatgtccttgctagctgtggtaatggttttgaatcccacttagggggcagaggagtagagtaatggccacttgtgttccctcccaccctcatcattctacagggcatttgccactcaagtactgtaattgagacatttaaatcatacaaataatgctgcccatgaaggatagaggaaatttttagatttccttttaaacctaacagagaaagattaagttacataaaaatgtaaaatacatgatctccagtacattgaaggaaatgtattttcttacttgaaatgtttgtgttacttagactggaagatttattaaatgatttccattctatcactcatgtttacagcaccaaatttggtgtccttgttctaaaaacaatagtacttttctccccatgacttttgaaaatgattactggtttactgattagcatggcgccatgtttgcttgtttgtccaaccttttatctgcatattttgataatgttgtgtggattaatatttgatgacatcctttgggtgatattaacgattttaagctttatttcttctgtcattttctctaaatgaaccaaagagggataaacttcagaatgtttttgatgcctggtggagagctgaactcttaagaaattaaacttgtttacatactatatttattcttgccgcagagacagtgaaacatttcatgagtgttatgggcagcatcataaaagcctttagactttgtttttcatctggggtgattaaggtaattctgaaggaaggttgagctcaaggagagctgagatatcaaggaatggggtatcatctgttttattactccatattttactcccagtgaagtggtaaacaattaaaattcaaacacatcagtgcatataattcagttactcccagaacaccataaaaatgtttccctgatcaataattgcttattatgacatgcatttgttgtgctagctgtcaaggtgcttagctatttgctttctaaaagtatgaaaagcacgcccggctcatcagcctatgtggtaacaaagagcaatccagctgtggatgtcacagagccactcttgacctgttgtgcatagactccctccccacaaatccaaacccactaagactctccaggctctgttaacacacaccagcctggttcagcttggatgccctcctcacaccatgtgggttctgattttccatgccaggcagtccatcttaaatggatgcatcctcaccgtgtttgggcttcaacttcctattctggacctcctcggctactccctaccccaaggcatggagggctgccttgttctgatgcaccttatgattttagcaccaaattgtacaggaagggagagaagggaaaggagaaagaagatgtgaaaggaaagagagggtagggaagaggaaaaagaagatgaggaacacgtattattttctaatcctcacaataggtcctcaaaatgagcaacatttccccctatttcatacttgaggaagctgtgactcagagagactaaggcacttgcccaaggtctcttagtacattaaggagccagcgtctgcacccagttccttctgactctagagcctggattctgctggctgcaccacactgtctttaaagagaacactctcaaaacgcgcttggtctttggattgtctcaaatgtgttagaatagtgttttaagaaaaggaatgcagatctcctgggaagcaataggtcgagttcatttcatgagaatcatttttctagccattggcctacttccccatttttctcctgtctgcatctaggtgcaacaggaacttggctttatttgactccattgccagggtggggtaatgaagctgggactctcttgtagccagcggcagtgagccagcagtctcactgcctacccagtgatggttccttctgtggccagcacttctggaatgagtcatctttacatgtttgccaacccttgtcctctcctccccagccaggttcacccttgctgctgtcaaggagctttgagactttctgagatttttaaatggggaagtagatgttaaacctagtatgaggaagagagggaaagtttgctctggtttcaaacacacagtcatagaagatgctagtcttaatgctttccatagcaaaaaccctgaaggcttagagtgtacacattgtgaactgaacttttaacattattgtgtaactcatttgttaatgcctatttgtcattgactgtggggtccatgtgaaaaactcccacaaacactctaacaaaatggaagacagaaaagaaagcaagcatcatttgtgtacaatagccaaagaacaatagccaaataaatttgatggtctcaaaagttaagcatcttttgaagagaaaatttgattttagggccaggtggggtagctcatgcctgtaatcgcagcactttgggaggcagaggcgggtggatcacctgaggtcaggagttcgagaccagcctggccaacacggcaaaaccccgtctctactaaaaatacaaaaattagctgggtacggtggcgcatgcctgtgatcccagctacttaagaggctgagacaggagaattgcttcaactcgggaggcggaggttgcagtgagccaagatcatgccgctgtactccagcctgggtgaaggagccagactctgtctccaaaaacaaaaacaaacagaaaaaagaattgattttgattttttcagatacagtgcatgaactttttatcataaaatattaaagctggggaaaatatcttagaattcacctcatgttcatgctttaccctgtgaagaaacagaggcacagagagaaataacttgaggataatggaaacaagcacacatctgtaagtgtgtgtgtgtgtgtgtgtgtgtgtgtgtgtgtgtcagagagagagagagagatgttcctttgtaagtaaacactcttggaaatagccgcattttattataacacaaaaagtaatgctaaagctgatatagttctggttgctaagcttcacacacaaaaggtctttaggtagctgcttcctaatttttatttctgtggcccaaaagtctccttgtaaaccttcgtgtcatgtcatactaaacctttgacatcaataccctttaaaatgtacaagtccttaaaaaaaaaaaaaaggcaaagggcaaatactaatgtgggaaatttgaattttaattaactgtttgtttcaatgttaggataaattaatgttagataaattctttggtaatttttccccctaaaattggatttttcaagaaacatcactggttcagtatattgttatttggggtagcataattttaggcgataacttaatatttgcatatatttgtcactactttgagttggtttttgtcccctgacccccagccaggatgttagatcacacagatttttttttctttgagcccttagggagagtccaaaacagtcacttcatgtactaggaaagtttacccagtcagcacacacagatatgttgttgcctacatttatatttgtgagagtgactgttaagaaactagcaggtttataaaatccgtgtgagaatttctctcaaataactgttaatggacaatccagcaatcctcccatctcaggctcccaagtagctgagactacaggcaggtggcaccatactcggctaattttttgtgttttttgtagagatgcggtttcaccatgtcacccaggctggtctcaaactcctgggctcaagtggtgctcccgccttggcctcccagagtgctgggattacaggtgtgagccactgcacccagcctgtacattttccttgaaatcgtttttggatgtttagtcttatttccttattcagagttcacctgtttattttttttttcatttccccaatttagcctgcgtttcacccagccctagcaatataggtttgggtcagagaaattcaagcggccaggggatgctgaagatggcccattatggccgggcgcggtggcacacatctgtaatcccagcactttgggaggccgaggcaggcagatcacaaggtcaggagatcgagaccatcctggctaacacagtgaaaccccgtctctactaaaaatacaaaaaaattagctggctgtggtggtgggcgcctgtagtccaagctactcaggagactgaggcaggagaatggtgtgaacccgggaggcagagcttgcagtgagcagagatcgtgccactgcactccagcctgggcgacagtgagactccgtctcaaaaaaaaaaaaaaaagatggcccattgtggtaagccttgacttgaattagtcaccaagctagtcttatctcttttctaggctaattcttgttttttgtttggctcaaaacaaattgtttgtcttcagaacacaataaaatccagggagagtgtcctgttcttcctacagacgtcactgggacatcttattctttaattaattcagtcaactaaaattggtcaaatacctgctctctgtgccagagttataaactttgtatttgtataattgctagtagctctcttacatttcttactttatctatctggcatttgatctacctaataccttccaatatcacctcatgtccctttaccagcttggtggtttttctatagttcaggaaatcaaacaaaatggtgtgtgacctggaggtactagaaaaacaatagcaaaccaactccaaagccagcagaagaaaacaaataaccaaaatcagagctgaaaaaaattaaaacgtgaaaatccatacaaaagatcaatgaaaccaaaagtttgtgattcaaaaaaaaaacaaggttgatagatcactaactagattaataaagaaaacaagagagaagatcgatccaaataagcacaatcagaaatgacaaaaatgacactacaactgatgcctcagaaatataaaaaatcctcagagactgttataaatacccctatgcacacaaactagaaaacgtagaagaaatggatagattcctggaaacacacaagccccctaaaattgaagcaggaagaaattgaaatcttgaacagaccaatagtgagttctgaaattgaatcagtaatacaaaacccaccccaaaaagcccttaatcagatggattcacagccaaattataccagatatacaaagaagagctagtaccaatcctactgaaattatttcaaaaattcaaggaggaaggactcctctctaactcattctgcaaagccagcatcattctgataccaaaacctgggagagacacagcagaaaagaaaacttcaggccaatatccctgatgaacatcgacacaaaaatcctcaacaaaatactacaaaccaaatccagcagcacattgaaaagttaattcatcacaatcaagtaggctttattcctgggatgcgaggttggttcaccatacacaaatcaataaatgagactcatcacatagacagaattaaaaacaaaaaccacaggataatctcaatagacacagaaaaggcttttaacaaaattcaacatcccttcatgttaaaaaccctcaacaaattaggcattgaaagaacatacctcaaaataataagagccatctattattcaactatccacagccaacatcatactgagtgggcaaaagctggaagcgttcctcttgagaactggaacaaaacaaggatgcctactctcaccacttatatcaacatggtactggaagtgctagccagagaaatcaggcaagaaaaagaaataaaagacatcccaacaggaagagaggaagtcaaactagctctgtcacagtgcaggcaatataattctgtacccagaaaacactgcagaccctgctaaaaggctcctagaactgataaacaacttcagtaaagtttcaggatacaaaatcaatgtacaaaagtcaataacatttccacacaccaataatgtctaagttgagggccaaatcaagaatgcaattccatttattttatccttttgaataaaatacctaggaatacagctaatcaaggaggtgaaagatctctacaatgagaattatgaaacacactgaaagagatcagaggtgatacaaacaaatggacaaatattccatgctcgtggataggaagaatcaatattattaaaacagccatagtgcccaaagagatttttagattcactgctattcctatcttaattagcaacatcattttttcacagaatttaaaaaaaaaaacctattccaaaattcatgtggaaccaaaaaacctgaatagccaaagcaatcttaagcaaaaagaacaaagccggtggcatcacactgtgtgacttcatactacactacaaggctacagtgaccaatacagcacagtccaggtacaaaaacagacacgtagaccaatagaacaagataaagaaccagaaataaagctgcacgcctacagccatctgatctttgacgaagttgacaataacaagccatgaggaaaggtctccctattcaataaatggtgctggagcaactggctagtcatatacagaatattgaaattggacccctccttttaatcatatacaaacattaactcaagatggattaaggacttaaatgtaagacctaagattacaaaaaccctagagaaaaaaactgggaaatactattctggccattggccttggtaaagaatttatgaataagtccccaaaagcaatggtaacaaaaacaaaaattgacaagtgggacttaattaaactaaagagcttctgcacagcagaagaaactatcaacagagtaaactgataaccaactgaataggagaaaatatttgcaaaccgtaaatctgaagaatgtctgatatccagaatctataaggaacttagataattcaacatgcaaaaaaccaccccatttaaaaatgggcaaaggacatgaacagatacttctcaaaagaagacatacatgtggccaaaaaatatatgaaaaaatgcttaacatcactaatcattagataaatacaaatcaaaaccacagtgtgataccaactcacaacagtcagaatgcctgttattgaaaagtcataaaatagactgggcatgtggcttatgcttgtaatcccagcattttgggaggctgaggcaggaggattatttgaagccaggaggttgagaccagcctgtgcaatgtagcaagactgtgtctctacaaaacatcaaaataaatggaaaaaaaaaaagaaaaagaaaaagaaaattaactgggtatggtggcgtgtacctatactctcacctactgggaggctgaggtgggaagattgcttgagcctaggaattcaaggctgcagtgagctataatcacaccactgcactccatcctgggtagcagaacgagaccctgtctcaagaaaaaaaaaaaggcaaaaattaacatgttggaaattagttcagtcactatggaatgcagtgtgaagatttctgaaagaacttaaaacagaactaccattcaacccagcaatcccactactgggtctatacccaaaggaaaataaattgttctacaaaaacgacacatgcactcgtatgttcctcacagcacaattcacaatagcaaagacatggaatcaacctagatgcccatcgacagtggactagataaagaaaatttggtacatatacaccatgaaataccacacagccataacaaagaacaaaatcatgggggtttttttgcagcaacatggatgcagctggaggccattatcctaaacaaattaacacaggaacagaaaaccaaataccacatgttcttatttataagcaggagctaaacatcgggtaaacatgggcataaagataacacggtagacaccagggattactaaagaagggaggatggaagcaggtgtgggttgaaaaactgcctattgagtaccatggtcactatgtgggtgacgtcagtatcatgcatacatcaaacctaagtgacatgcaatttacccatgtaatgaatttgcacatgtatcccttgaacctaaaataaaagttggaaaaaaataaaagataagatatcccgtatcctcaataaaaataaaagtggcgtgtttgtgcacttgactttgtaacatgttttccaaagatgtctttgagtcataaaaatgggaaatacacatgttggtttctctagtcatcacttgacaacttacatgttttacctttcttatgatggtctgtctcatttcttcagtgacagggctagacattctgttttaaactcttcccacagctgtatattattcaacacaactttaacagagttcatagagtggagattgaggatgtttgcaaagttaaatcatttatttttattttttcttaaccatgtcccgcctgctttattcattattaagaacattgatgtgaagattaaatggttttctctatttttatcttcaaacgatctctatttgtggcttctgcacattgctagatttattccagccacttacactagggtcatagtttagcttcagctcggagccaaatgccccacagctgaaatgaccgcacctctgaagtggcattttcccaggccatgcctccctttaataatgagccagccagggggtaaatttgtatctcattacaacagagccttgtattaggcctggagaataattaaatgtgaggaattataattggttccctctttgaaagctctctcagcaccatgtctacacttaagccattacttttatttttaatctaatggtttgccgctctctctccctctttctctctccaaattaaatatcaaccataaaagaaaccaaggaagtccagaaatctgtggctttaaaaagactggatctcgaaaagattttcacaagacgcttccgaaacagacgtttgagtcggaaaccttggagtgcagtgaacccgctgctca

SEQ ID NO: 15565 - DNA, 192158 bp, Homo sapiens
ctgtgaatctttcaaaggtatgttttactggagtgatttctggttatttcagaaggataatttgtgtgttgcgtcattaatgaaatagtagtacgaaaaacctatagcatcttttactgcaggaggtaactttccatgccattttttcagaaaatctacttatgacttcagtggcttgctagactggcctttttatttgtacttttcctgtgtttcagaattgcagagtataataaaggcatgtcaagtgcatattgtgtccattttcaggtatattagataagctttacaccaagataaattagatatgcttattggtttaatttgtgctaatatatatttaattgaaaaatcaaaaaaatttttttaaattgactgaagttgtattccaaaacatgcaaaatttagtttaaaatagattggatacacttttaaattttaaacaaggtagagggtttagtgctttgcttttttaaaaagtaaatgaaggctgcagctttctgcagtagttgtcttgggaagtagtgtggacatcactcctaagagacgttaaggaagtttagctaacaggctttaaccctttctctccataccagcttttactcttttttttttttttttgagatggagtttagctcttgtcacgcaggctggagtgcaatggcaccatctcggctcatcgcaacctctgcctcctagttcaagcaattctcctgtagttcaagcaattctcctgcctcagcctcccgagtagctgggattacaggcatgcaccatcacatctggctaattttgtattttgagtagagacggggtttctccatgttggtagggctggtctctaactcctgacctcaggtgatccgcccgcctaggcctcccaaagtgctgggattacgagcatgagccaccatgcccggccaccagcttttactttaatgccacagccttaaattttctttcaggagaaattattttatgtaaagttacaaaggaaaataatgcttaatatctgtaagcattcgtttggtaagtttgctgcctcctcagtaagttttgatgaaagtgaattttgatgaattactaccttagccgggtagtgacgttaacatgtggcttagctgtccattttctaagatatcaagaaaccagcaacaataagtaaaattgttaaattatgcaagaatcacatgttcctacctgtcatcatttagtcttggttctatttgcatgtgaatatcctttagaatatattactcccagttattccgctttacttttctgaatctcttttcccatctcttgacttcaacttcagtatatggctcttgttccttctacctggagaacggaggcatgtggaagcccagaggattgaattcttttttttttcttttctttcttttctttttttttttttagatgaatagtctgcttaggaaatccatctccataatgtttacctggtatcgtgttgtaatgtcagaatgaagtggctgttcttccccttgagtcatcgtcccgaatgaaggttccccaaaagaaatcatcaacttatgtggtgatttccttttacctttaaaaaaaaatttcttttcatggaaagataatggaacatgtcggtaagattcatttctaggaaggcaaaggagtagtttatcatctaaagactctcaacctaaagctgttttagaaaactttccttaaaatgagaagccgtaggttttcgttgcattattttggctaattgaaaaataagaccaagtgcgttctgaccttcgtttctcttacctttatttttacaaccaccatttcaatggcccacttgctgatacaaatgattgtttaattttaaaaagcatttaattgaagtcaagttatttagaacctaatcatttacacgtctttgttgttgctgctgttttgcaagagtgaagagcttggagtcaggtgaatctgggatgaggtacagttgtcatttattagtcatgtaatttgtgacaagccacttaatctctctgaagacttcagtttcttcatttgtaaaattggcataataatgctgtccctagtagggaatatagaattatataatgggtcctttgtatatattggctagtattgctctcttacgatttggcactatggagacactgtgggagattaaaagaagatgatgaataaaaggtgacttcagctctgaagggctttatgatccatttgggagaacaggtaatgtagaatatactggcttcaaaagtggcaggtgtttagaagagaaaaggatacatgatgtgataggaggcaaaggcttgattgagaaggctgagaagacttagagtaagggttctcagccctgactggacattaaaattatctagggacaattcaatcagaattcctgggggtggggaccaagcatcagtattttaaagttccctggggactttaacttgaagcccaggttgagaatcatttaaacagctctgttatttatttatttaaaattttaatgtattttttgagatggagtctcgctctgtcacccaggctggagtgcagtggcgcaatcttggctcactgcaactcctgcctcccaggtccaagctattctcctgcctcagcctccccagtagctaggaatacaggcgtgcaccaccacaactggctaatttttgtacttttagtagagacagggtttcaccatgttggccaggctggtcacaaactcctgacctcaagtgatccacccacctcggcctcccaaagtgctgggattacaggcatgagccactgggcccggcctagttttactttttttttttgtaatggaatttccctctgtcacccaggctggagtgcagtgatgtgatttctgctctctgcaacctctgcctcctgcgttcaagtgattctcctgacttagcatcctgagtagctgggattacaggcagctgccgccatgtctggctaatttttgtatttttagtaaagacggggtttcgccatgttggccaggctggtcttgaacttctgacctcaggtgatccgcccgcctcggcctcccaaagtgctgggattacaggcttgagccactgcgctcggcccatttaaaaaaactttaaaggtagacgtattccaaatggggggaatatataaagaaaggtaacacttattttgccctgtgtgctttgaatttcagaaggtgtagtaagcaaagaccacttactaaccctacagatatatccttagaaaatacagtggtttctgtcataaatctgataaatcagatgagaggaagggtgtatgtttgatgttgatttttctttttgttttattggggtttttaaaaactataaatatcaggtctgatgactatgtgtataaacattttctaagtagataaaatattttcaaattttgcattttttagtatgaaggggatccatcatttgaagttggttttctagatgtgatgataaacttgtcccaggtctatttgacactcctaccaaaatcctttgtgaccagggctagaaggcagctgtggctagtaaataaccctgtgtgtagactcacttattggctttggcattctctattgccacagctgtgtgaatagattaaccagagaccctctggtgccagccacctattcaggcaaacaagtctataatcagtacctctgttaaaatgaaactgtaatatactattgtcttttcatttatttatttatttatttagagacagggccttgctctgtcgcccaggctggagtgcagtggtacaatcttggctcactacaacctccgcctcccaggctcaagcgattctcctgcctcagcctcccaagtaactgggaccacaggcgcaccattgcgcctggctaatttttgtattttttttgtagagacggagtttctccatgttgtccaggctggtcttgaactcctgagcttcagtgatctgcctgccttggcctcccaaagtgctgggattacaggtatgagtcattacacccggcctattttctgattgttcaaagtagaagccaggcacaatggctcatggctgtatgtaatcccaacaatttgggaggcagaggcaggaggatagcttgaagccaagagttcgaggccagcctaggcaacatagtgagaactcatctctacaacaaagttaaaaagaaaaattagccaggcatggtggcacatgcctttagtcccagctacttgcgaggctgaggcagaaggatcacttgaactcaggagttggaggctgcagtgagccatgattgagccacagtactctagcctgggcaacagagtgagaccctgtctcagaaaagaaaagagaagagaggagaagagaaagagagaagagaagagaagagaagagaagagaagacatacaaaagaagagtaacatacaagagaagagttaggagaccctgtctcagaggaaaggaggggaggggaggcgagaggacaagagaagaaagagttaggatctatgccctaaggaagtaaggaggatttgagactgtgtaggtggttaataaccttaagctacatattttatggagggaaaaatcctatttttaaaagtgagaatagaacaattttgaagtgaaatggaatgaattagctggaccataacggctctgactgaagaaaaggatgtaaaaagccacatcctggatatgtaccaaacaccatggttacatggcatgtttgtatatgtaacatttatttaaaaaaaaagtctcatagcttagaaggcatttatttttgttatgtgtataggcttctgtgcaataaagcagccttttttattttacagctcatgatgacttaaatggttaattgcctgataaatatggtcctcttttattcttctgattctgttgttcttttgcacttcatctttcaaggggttgggctattcttaggtttcactgattgcactggaagggacatgacggaaaatgaagatctcaagataattttcttgcaaattcacaatggaagataaaaggaaagagtggcaggcattctgcacacagagcagacgtttctttattgtcattgttcagcagaggaatcaactcagccttggtgaaactagagtgatgcccatggtggcatgtcagcatctccctcttagtggcatcagtgctagattgttgttgttggaagcaggagagtgtttagtccataaagtacagaacttcgatatcacagaagctagaagaactttactgccttcagcttcgtttaaagatagtagagagcttactcattcgttttagaaatatgtattgggtctctatgtcaggaactgctggcacagcagtgagattgaagatacaacagtgaatacaatagagggcctatcctcatagagtttgcctttcagaatgagggacagacgcagacaaatagaaaatgtcgattgtgtcagggagtattgagggctttgaagaatgaaatcgtgacccagaagagatgcttttagattggatcatccgtgaaggcctctatctagaaaggagacacttgggcagaattctgaatgaacttgacggacatctgaaggaaaaatattccagtcagaaggaacagtacgtgcaaagtccccaaaacttcaataagtgacgtgctccagaagcagcaaggaagcagaatgaggcctgaacagagtgggcagtaggaaatgcagtcatagagaaagcagggctgggtcacaggcctcagagactgtagaacattggctcctactctaagacaggaagctgctgtgagcattgaggttgggcgtggaaccatttgactttttatgaggatcactctggctgcagtgtggaaaatagactggacgagggagggcagttaggaagatgtcacggtaactcaggaaagcaataccggtgctttggacgagggtggtggcagaagagaaagtgagaagtattctggatatatttcagaagaaagtggataggattttctgatgggtgatatgtagagtgtaggagaaagagaagaagcaagattgactttaatgttttccacctgggcaattggtggactggaattgccacttgcagaagtgtggaggtatggaaggtatgggaagagcagattgccaggaaagttgagttagttttgaactcattgtgtttgagaggtctgttaaattatcaagtagtgatgttgaggtgtaattggaaaagtcaacctggaatttatggcagaagttgaggctgcagatataaacttgtaattttaaaaatgtatatttaaagccatgggagtgaatgagttcatttgagattgaatgcagattgagaagagatttagaattgaactccagggcactgcatagcaggaggaaaacctagtaaaagtggtatctgtaaaatagaggaacgaactgtcacaatttgcctggtactgaggattttctcagtacatgagactttaagagactgggacaccctgagacaattggttgccttccatgggaagaaagtatgtcaagagggagagagtgaacaactgtgtccaataaaccaggactgagcaaaaaccattgaatttggcatcatgaagtcttaggtgactttgacaaggcttgtctgttgtgaacagccaagtaaatgtgaggaccactctccaaaaggtaaagaaacatgcatgaggatacaggtgcgccagctggagacatcatgcctcttccccgtccccaccaggagtggcgtgaagcctccccagtgctgtaacgaggcagccaggtcctgtgtgactgcacatgtgacttggggcaagtcatttaacctctctgttttcactatcctatttgtgaaatattgtttagatttgtggtttgagtcagctatctgtatactacactgtgttaggagctatgtagattaattttcaacagatatggttctggggttgtaggaattttcaatttgagaacaaattgaatcttaccctttgtcaggagaaatagcctttgacatgtgttaggggcaagggaaatctcaaacttgcttaattttaaaaatgaatatttggttgtggataatttaagctttggtgatatttctaattattttttgtgtgtttctagtctactgaccagaagtctgaaaaaaacaactaaaaagaaagactgcataagccttcactagagaagtattgaaaattgcttgagggaagtgacggtttctttagcctagtgtctgtaggaccccagtgtagtgtttgttgaatgaatgaaaggaggcgtatcagtcaggttcactcagagaaacagaagctgtaggaaatccatatggatgtgtgtgaaggtattggcttgcctactgctggtgtgtggctaagcgagcttaaaagtccgcagggcagatagtcaggaaggaaatattcccaacagactgagctcccttgggcacaagctgaagcctggagtctgaactgccagagagcctctaccttcttagaaaaggcttcccactggctaagtcaggcccacccaggggaatctctcctttgattaacttaaagtcacctgtttagggactttaattacattggcaatagtcccttcacagaagcacctaaatgactgatgatgtaactgaaaaaatgtgtgtgtatgctacaaaatggctgcagtctcccttctgtcctccagctcttgcaggagaactctcttgtagctcaccctgtctgaaaacatactggaaaggaattcaaggaaatgtagttcagcctagccacgttgacacatcatgaagccgtcacaaaaggtaaagcctggtttaggagcatttgcatttgcagtcttaagtatttttgtcttatttttcaaaaggggttgggcacggtggctcacgcctgtaatcccaatactttgggaggccgaggtgagtagatcacttgaggccaggagtttgagaccagccaggccaacgtagtggaaccccgtctccactaaaatgacaacaattagccaggcgtggtggcgcatgcctgtaatcccagctattcaggaggctgaggcacaagaatttcttgaacccaggaggtggaggttgcagtgagccgagatcccgccactgcagtccagcaacggagtgagactctgtctcaaaaaaaaaaaaagtagttttggtttttaatttttgattttttcttatgttattacatataacgaatgatatgcatactctgaaaaatcatgacataaaggtgaccttgaaattactttgatgttcatttaaactagtctttggtctccactggctaggagaccacatatagcagaacagcagagaaagcaaaacagttaattttcatgtttggcttttgagcttccagggacccaagtcttgccttgaaccgatcttaggaaattcctcattccctacccgaccctgtttctaaactgcatccctgctgaaatgcaatgccactgtaactctctccaatatttgttttcttctttggcttaccactagatgtatgtatatatgtttgtgtgcctgtgtgtgtgtgtgtgtgtgtgtgttgactgcctcatagtaaagcctactcttgagattaagactcctgatagtttagagaacagaaatcttttttagttcctggttattacttgaatttgcaagaggaacaactgctaggaggcctagttaacagtagttagggtctccacccacttgccaagggcaagactagtttacaccacatttggaatgaccagtttcctcccactttagtttcagtgtagaaagagtaggggagacgaactattcaatgtcagcttgggtgtagtgccagaaccgtactcagtaatgctgtcattgctgttggtgcttaccagctcttcagtactggaatagcttcagacctcgagagtttatgactttatcatcaactgggtgtgttgcccttggcacattgccacacagtgcttaatgatgatatatgttctttatcaaattccccccaccaaataatggcattatttacgtgtgagaaagttgcacatttcaccacctcatggtttattagagtgcaattccgtgagaacaactgcctgtgatcctctgtatccccagtggccaactcaggagctcagtatgccctacccagtagatgctcagaacatcattgctgagtgaggaagtcagccatcattttctccctggatagtctctcctgtagataacaggggccgttatcagccaggtttttcatcatttgtggctttgaatttcagggacatgacaagtttgctttttgtttcgttttgttttttttttttttttggttttctagagacagggtcttcctgtcactcaggctggagtgcagtgatgtgatcacagctcactgcagcctcgaactcctgggctcagtgtttctcccatctcagcctttggagtagccagcagtataggtggtgtaccaccacacccatctaactttaaaaaaaaaaaaattgtaaagacagagtctcacttttttgcccaggctggtctcatactcctggctcaagcaatcctcctgcgttggcctcccgaagtgctgggactgcaggtgtgagccaccttgcctatccaacatgacaagtattattctctggcaggaagtgaaattttttctcactgatgattgcacacaaatgtcatatctccatgaggcttctactcactagttttacggctcatgtcaccttgcttcaaactatgcttcagtataattttgaagtgtatatttccattgcctctccttgagtaattgatattcttcacaataagtttacatttattatcacttttatttacttactattattactctgagcagccaatcttatgagaagctcagagtggaacgtgtgggtcctggtaaatatattatttgactcacttccaaacacacttaatattgcctggtgttttgattatttcaaaatatacagatttcttgaaaggcctgcaaaaggaaacaatcaaaattatagcggttaagaatgtgagtctgccttggtttgaattccagatgggccagtccctagctgtgtaatcatgggaaaattattaaatctctagcctcgctttcttcatctgtaaaatgagcatacaggctgagcatccctagtccgaaaatgcaaaattcaaaatgctccaaaatctgaaactttttttgtgcctccatgacgccacaagtggaaaattccacacctgacctcacgtgataggtcacagtcaaaacattgtttcatacacacaatacttttttttatttgtataagtttaagtggtacaagtgcagttttgctacatgaatatactgcatagtggtaaagtctggacttttagtgtctccatcacccaaatagcatccattgtattcattcaggaatctagcatccctcaccccctcccatcttcccacctctccaagcctttcatgtctagcattctgtgtccatgtgtacacattatttagctcccacttctaaatgaaaacatgtgatatctgtctttctgtttctgagttttttcacttaagataatggcctccagttccatccacgttgctgcaagagacatgatttcattctttgttatgactgaatagaattattcaggcacaaaattattaaaaatattgtttaaaattaccttcaggctatgtgtataaggtgtatatgaaacataaatgaatttaatgtttacatttgggttccatcccgtggatgtctcattttgtatatgtaaatatgacatgatatgaaaaattcaaaactctgaaacaccaattgaactcaatttgcagtaagaatgcatacctcacagggttatagtgaggattgaatgagacaatcctagtccaatttctttgcacatagtaatgctcaataattattacttaaatgggtataaactttatagtaatgaggttggggctggaaaaaatgcagtttcataatttcctatagaagtcattcaatcctgactctaaactctgtattccatgtggtggttgggtggcgtgggagagtcctctttatcctgtggggttggtcctatggaggtgtctgtggcagattggcagatgcatttgtcttgtgcatagatggtgtctgttgtttcctctggcagagttcaccagtgtcctaatgcaaacttagtcctcatctggctcctgcacaggctgatctctggctcctttagcccctcatggttcctgttgtttcattttcagagggacccttgtaaggactatagtcctctcttcagctgaccttcaggtccccagtcagaaccaagggaaccgactctgtcccttctcatagcacctgaaaaccccgggaaacgaggggaatgctttgctctcagctactgaggttgtcctgtcaccttctcttctgccctcctttgccatggcataggataatgtaagtcagcaatctcattactcggtatatagccagaggaatataaatcattctaccataaagacacacgcgtgtgaatgtttattgcaacactattcacaatagcaaagacatggaatcaacttaaatgcccatcaatgacagattggatgcagaaaatgtggtacatatacaccatggaatactatgcagccataaaaataatgagatcatgccttttgtgggaacatggatggaactggaggctattatcctttgcaaactaacgcagaaatagaaaaccaaatgctgcatgttctcacttataagtgggagctaaatgatgagaacttaccaacacaaagaaaagaacaacagacactgtggcctacttgtgggtgaagggtggtaagagggagaggagcagaaaagataactatgtggtcctgggcttaatacctgggtgataaaataattgtacaacaaacccccatgacatgactttagctatgtaacaaaccttcacatgtacccccaaacctaaaagttaaaaaaaaaatcccagacaggaagtagggcatattttgcctaatttgcagcttcatcctcactccctaacttacgccactcatgtctcctccatcatcagggacagcaagagtggggaggggacgaggcctgccacatctccattctctgatcttatttcctcttgcctcttcaacagcgctttgtctctcctctccagcttgaagcccttactctggtatgtgatttcaaagcgatgaaaaactggtttcgttagtacttcccttggatctgcccttgtctcccatcaaggcagtgcaagtaaagaatccaagatatttgttttgttggtccactggagggtagagatagagaaaaacagtaacttccccaccacccccaacctcccttgggctgatgactccaaagactgccataaatgaacacttcatagagctgctattaatatgacacaaatctacttgatctaagggattcttttactttcttagggtggtcattcctaagtctttggatttcacagaaaagaaaatatattttaattgaggactgacaaaggttgccaactttttatcaattataagaattgtttttataattaccatcaatttctattatttcttttactccccctctttccaactgtggaaggtaaaattgaagagcaaagaacacttatttcaaagtgagtaaatttagctatatgaaaactcagcagattgccctgagtttccttgcgtagctgcagtccagtggaaatttcttccagaccagcaccagtcgccccagtgacatttagaaatcactgccctggattgtttcagccaccgaaacactcggtgttcactgtcagctatgattatatatgaagtgctttcgagaaccaatgtatagcataacttaggccaaaagaaacactgtgcctaaacactcagccaaggagtgttgagtttgcctggatttctggaaaattgtctccgttccctagttcactgtatttgggtaaacaaaacatggcctcggagagcctttgcgggagaaattataaaaattcagcaaagctttgtgatctcattttggatctcctcaggattcctcatcaagttgcaattaaggagagaaaaattccgccttggggtgggattttaattactcatcatgttatgacttgactttctgtgctgcatttttttccatatcactacttctgtgtttgacagctcctccaaagagtcgctccgttttatgccaggagcgaagtacttactaagtcaaaggaaagcaaggcaaacatctactattgcctttgtgcttttaccagaaaactgggtgagaacctccttttccttttccctgcccctccagcctcagttttatgaccctgtggagccagtggactttgaaggacttctgatgacacacctgaacagcctggatgtgcagcttgcccaggagctcggggacttcactgatgacgacttggacgtggtgttcacgccaaaggaatgtaggactttgcagccctctttgccggaggaagggtaaatagttttctaaaatgtagatgtgattgggattgtcatgattgttttcaataagtgggtaggggagatgccttcaatctgaacttaaaaataaaataaaattactcaatccattcaaatgtgtgggacagctatatgatatcatcatgtaagtatagatagtttttaaattagtttggccagagattttgaaaagctatgtgaagactaagccagtgcaagggatgcaggaggaccaaatgaaatgctcaagaggaggttaaaagtgcaggctctggagccagaccacctggctgccagctcagtgaccttggctgtcacatgacctcccaaatcctcggtttctccatttgtaaaaatgtcaagatttttaataataattactgaaatgccaccatccagaagcattttaattgcttacagttatgagactggatcaagttagaaacataaggtaaacccacatttattgagcatctactatgttctgggtactgagataaaaagatgaataagtcaaagtccctcctttaaagaaagtgtcatgcagtgctaaaacagtggggagagctctgtagaataaatatgtgaatagctaattagggcttgagtttctatagttggctcttctatatgtttataggcttgggcattagtttttggcatcaaactaactgtggaattgtagctaaatgaaacgcctgttgcttctaaaatgtaaaaaaaaatgtctctttggaggtttaggataaacttttatttacatttattttaaaagccaaattaagattcatatcctcctggacaggttccatcttctcatcttccccagaaggtcccagaaagaagatcctgacacacagcccctgccctctttactctgagatattctagttctattttggattttatttcatcacagtttaaggaggttggatgataatgggctggtattattgtgaaccgttgctctcttgttcagacagtcctcactcacataggagaactgaccatatgtgtagctctgatgttttaaaaatacacacttcccaggaaagaaaaacattgtcatttttgggaaacatactcccccattttcagtccatttattcaggtatgactttagtataagttaacacctactatttcatctttagtgaagaatcatttaatttattcctttatgtaaaatttatggatgtttccaaatatggtcagaatcttggaaaaagctgtttaaaatgcttacagtagccagtcaccgcagcttgttcctgtggtcccagctacttgggaggctgaggcaagaggatcacttgagcccaggaatttgagttcagcctgggtaaaatagtgagaccctgtttcttacaaaacaaaaacaaaaaacagtacaatgaatttagaggaaggaggaggtttttttttttttgaaatttgataaggaagataatttctttacttagcatcagttttttagtatactgttgccttgtcaaaagaatttataggtaacatacctgtctgatgtctttaagacagcctctactatttcagttgttgccaaaaagtcttctgtataattaaggcaggggaaggtatcatcatcacaccagagtaaacaatagctgactcctgttgaacaacctgtgcctagcccagaactttatgttgagctgtgatggcgtggtagtgaaaaacatgaacgctacaggtgagctgcctggattcaggtccctgctccaccacttgctgtgtgacttggaacaagatccttaccatctcatttttctgcaaagtgagaataatagtaatgcctgccctatggtgctgattgagaattaactgaattaatacatataaagtgattgcctcagtgcataatgcacagtaaatgctacctaagtgtaaactattaatatcatatatgcgtcttattgtgtgccaggcagtcttctaagcactttgcacactaaccgatttaatcttcatcaaagctgtctactaaaaggggcactcttactactctaacagctttaaggagaggaaactgaggcacagaagggttgagtgactggcttatggtcacatagctataagcgatgaagctgggatttgggcaattagggcccagagactgcatgtgtaacctttacaatattttatctaatactaacagcatgtctctgttcttacctccttatcacagatgagaaaattaaggcttgtagcatttaagcctgtttatttctggtactaatgcatttgcaacaatagcaaaaagctttgctacaattgttatttttgatttcaagactctgaagcacttgaagagtattgctcatggtgcattccttaagtagacatgacaggaaccaactgaattaatgatcaccaacaaaagccagtgtttgcaatttcatcaaagcataagacaactgttctttttcctggctttcaaaaaggagaacacgcgtgtcctaacaaggttacacatgcataaaaaatatgtccaaattaccctgtcagagataggtatttatacttattttccttgttttgtattcgaatacagctagttctacctgtcttgtgtctgaatgccttcggggatagttataatttaacatgattctgtataataaagaaaacccacaaagcaaaaaaatgccaacatgtttgtctcatcaaagtaaaaatgtttattgccccaggaatacttcagacatttggaatgattgggcaagaacatcctaagcattctcactgataaggatttaaattcgtgtcatgttccttgctcatgattaggggttgttttgttgttttacccagtaataacgtgtttatttcattttctacctcattagggttgaactggaccctcatgtcagggactgtgttcagacctacatccgtgagtggctaatcgtgaaccggaagtaagttactttttttccactttttgtatataaatattaattttatattgctagtttttaaatatttcttaatactttgaacagttctaggtttacagaaaaattgcatggcaaatagagttctcatgtatgccttccttatccccactccatatcacacacacagttccccctattatgaacatctcactttagtgtggtacatttgttacagtagctgagccaatatggatatgttgttattaactaaagaccatagtttacattaatgtttactttttgtgttgtatattctatgggttttgacaaatgtgtaatgacatgtatatgcctttacagtatcatacagaattgtttcactgccctaaaaatcctctgtgttccacctgttcatcctccctccctggcaaccactttccttttttactgtctccataattccaccttgttcttcaatgtctttttgtggcttgatagctcattttttttattgctgaataatctttcattgcatggctgtaccattgtttatttatccattaacttactgagaaagaaagttctattttaaacataaagaatagactgcaagcttgcccaacccctagcccgtgggcaacatggagcccaggatggctttgaatgtggcccaacacaaattcataaactttcttaaaacattatgaggtttttttttttgcgatttttttaaagctcattagctattgttagtgttagtgtatttgatatttggcctgagataattcttcttccagtatggcccagggaagccaaaagtttgggcacctggaatagagcctttttgttgtcttctaattctgatgaattcccagggggaaaaattaagtgaattgaaacctggcctcagcttcagaggtggcattcgagtttatgaccaagaaataaattacttgctggccttccagtaagggatctttctctcctggattaatcaaaccttctgtgacattgttctgagctttttctctccatgccatggacctggacagcactctctcatgagaaacatctatgcacattgaaattctcagcctgcatgggtgtacctgttggggagtgagatgtggactctctacagattagggcacaccccactagagacacgtcacagaacctttgacaagacattagtagtttaaaattctgatagcctcactcctcctatacctcagtaagaattactattctatggggtaaatgatgaaagactttgaggattgggttttatctagctcctggaagggtgccattgagtttgtgctgaggttttctggagtaatgtcaatatgcacacattttcagcagcagaaaaagagaaagcattcattattaaaagttattaagagaaagttagatgccaatccatcatctgttctaaaatgaatggaaaacaaagtttgctgggcagtcagataaaattatggtttgctgataataaataaaagatttcagaacaagttgttctcaagtttttaaatgctatcattagaggtactttctggacattaaagatctaaaaaaaatctgagaaggaacaaatagaaagatccattttgatacatttggttttcagatttattttctatttcgggcttgtccactttttcatttctcatggcaatgcacgcttcttggagtagtgatttttcttgatcttgcacaaatgtaagagaaaaaaatgactctttttggaatactcgttgaaattttagaaataattatgaaacacaaatcactcagtttcactctagacagataatcatcatgaacatttgatgtctgtcctttgaatagtgttgggtttttttggtatatatttgcgtgaaaactaaataagattataatatcatttttgtaacatgcattttcagttttcacagtaaagagtgattctcttcctttgctattaaatatgcttcctcaatacaatgattgatgattgcataatatatttataccaaaatttatttaaccaattttaatatttaggtgattccttccttttcagtgttgtgcttaaaatgcaaaaacatccttctcaggaaaaatttgtacatatttatgatttttttctttggaattaattcctacaagaggaatttctatgtcaaaggatatgcacaaatttaaagatttggaatactagatcaaacattatgccgggcgcagtggctcacatttataatcttactcagcactttgggaggttgaggtaggaggatcccttgaacccaggagttcaagaccagcctaggcaatatacagagaccccacctctaaaaaaattttttaaaaaattaactggatatgatgacatgcacctgtagtcctagctactcgggaggctgaggcaggaggatcacttgagcccaggaggtcaaggctgtagtgagtgacgattgcaccactgcacaccagcccaggcaacagaggaagaccctatctcaaaaaaaaaaaaaaaaaaaaagccaggcacggtgctcatgcctgtaatcccagcactttgggaggccaagacgggtggatcacctgaggttgggagtttgagaccagcctgaccaacatggagaaacccagtctctactaaaaatacaaaattaaccgggcatggtggtgcatgtctgtaatcccagctacttgggaggctgaggcaggagaatcacttgatcctctaaaaatagctaaactgggaggcagaggttgtggtgagccaagatcgcgccattgcactccagcctgggcaacaagagtgaaactccgtctcaaaaaaaaaaaaaaaaaaaaaaaaaagattattgacactacatgcatgaatcctcaagaatattagatgttataatttatcaacatttccaattttatttgataaaaggttgtcttttttttcattttcttttactattagattaggcatctttcttctatatatttcttggccattttttatttttcctggtgctctgcttattcgtgaaatttgtgcatccctattaatgtatttgtctagtctgatttatttttataagcacttttttggtaaagatattaagccttgtctaccatgtattaaaaatgtcttccccagtatgccttttgtcttttaaagttgtttttaattttcaacattcagaattatttatgtcattaaatctatattaatatttttccttatgtttaattttggcatcatgcttaaaatttgattcacaaacttattattattttctaagagtatgggattaaagcattaatccagatcattagccacttgactgttgcttctgttcccttatgtgtctccatttgtttttatcttttctacagaagcaatggttacccatatatttattatatgcaagtttttgcatcttgttcccctaaaaaagaaaggaatatgtgttttaattttatgtttggcaacattctagggatgggattaccattggcccagttctctgcacccctgtgtaatggagcagttcccttcttaacggtcacctagtggacagggagaagtgtacaacttcagaactcattgtcagtttctggcaagctttcttgtagaaaagttgcatctctttctatccctctgcctcattctcttgcactctgaatctaacactctgcccatgaaaactaaaattcctagcacacactcctcccagggatcattctgtctctatatgcacctgtcgtattttatctgtggggagaatccagtacactattgccagatgtccttcatctcccaacctcacacagtacatttttagcttattgttttctgtgagttgtatctgtattgttttagaatgatggtagaaggagaaggacaaggagaaggtggtgattcatataaatgaaaccagctggaagctgtgatgctttcatagataagccactattatgaagaaggagacttcagatttctgtatagacactgaccagggactcgtgggcaggaaggtgtgcaacaccttcttatctttattcagtgagttcccctttggggagacaaagtttggtacatccttctctttccagctccatctgatccacagaggttctgtccagattcaggcattaagttatctcttcatttggatgagtttccagtttttctgtgtcttcataagtggtttactagaaagtcggaggaggatgcaataggggttgctggccatttgttaattagtgattaattatttagctctcctttaattggttatgtgccaaatcatgtatgattgttttgaaagaaatcaagtaatatggaggtgcattaaggaaaaggcaaatctcatgcctcactacttaccagtgtcctacccttcccttaactcactcttcactgcgtaaagcccagctgtgtagcttccagatcttttcataccctcacaaaaaatatttgtctatttatatttttcacataaagatatatgtattaatgtatgtacttatatattacaaacatttctttaaaataactgtccatgtcagagctatatcccattctactgaaatgctgcctagtattcaaagggtgaaggaatgtgtcctaagttactgaaactaaatgaccattttggttgtcaccatttttcataattgcaaataatactgaaacaaacatatctgcacatttgccccatacatgtgtgtgaatatttctgagggtagaaatgaagccagtgtacatggtatgctctgataggtactgccaaattcttctccagaaaagtcgtgctgtttcattccattaccaactgggcattaaactggcgtgttcccatattcttgccagtgctggatattatttattaaaataaaatttcagttcctccagtcttcttttagttattattttaatctggaagctattacacctactttctgaatacagtttcctatcaccaagtttcctttccttatgtgttctaaaatcccagttaaatatgcacttaaccatacaaccgtaagtcccactcttgagtatttacataaaacctatgtgcaaatacagcagtttagcagttttatttgtaattgccaagactgcatagcagttttatttgtaattgccaaaaactggaagaaaacccagattgtactcagttgggtagtagataaacaaactctggtaaatccatacaatggaatactactcagcagtgaaatggaacaaacaattgatatatacaacaacatggatgaatctcagatacagtatgctaagtgaaagaagccagacaaaggccgggcatggtggctcatgcctgtaatcccagcactttgggaggctgaggcaggtggatcacttgaggtcaggagttccagaccagcctgaccaacatggtgaaaccccgtctctactaaaactacaaaaattagctgggcgtggtggcacgtgcctgtagtcccagttactcaggaggctgaggcaggagaatcgcttgaacctgggaggcggaggttgcagtgagctgagatcatgccattgtactccagcctgggcaacaaagtgagattctgtcttaaaaaaaaaaaaagaagaagaacccagacaaaaaagataactgcatgattccatgtatctgacattctggaaaagatgaagctacagggatggaaaacaggtccatggttcccagggtctgggagtggggaagagggctgactacaaaaggacacgggagtgccctttgcgtggtgctgggactgtagtgcccatgatgtaaaatctgccttggaccattacattagaagaaatcaattccagttatcccaatattccctccaagtgaaatactttggtagcatatataataataattcaataagtattagctattatatttattaagtagtacctatcagaaaacatacttatattagcatgtcaaaggaatgaacacaaaattctctcccatatattgaacgcaccatggaggggggacctgccttcctctggaggaccatacttagtgaagccactttgccttataaggacatgcctttgttatccagaaccaagcagtcaaacactgatttagttagctcctttatttctcagttatctcctgctgatattacatttctccataatatctagagataggcttttatgtccttgctagctgtggtaatggttttgaatcccacttagggggcagaggagtagagtaatggccacttgtgttccctcccaccctcatcattctacagggcatttgccactcaagtactgtaattgagacatttaaatcatacaaataatgctgcccatgaaggatagaggaaatttttagatttccttttaaacctaacagagaaagattaagttacataaaaatgtaaaatacatgatctccagtacattgaaggaaatgtattttcttacttgaaatgtttgtgttacttagactggaagatttattaaatgatttccattctatcactcatgtttacagcaccaaatttggtgtccttgttctaaaaacaatagtacttttctccccatgacttttgaaaatgattactggtttactgattagcatggcgccatgtttgcttgtttgtccaaccttttatctgcatattttgataatgttgtgtggattaatatttgatgacatcctttgggtgatattaacgattttaagctttatttcttctgtcattttctctaaatgaaccaaagagggataaacttcagaatgtttttgatgcctggtggagagctgaactcttaagaaattaaacttgtttacatactatatttattcttgccgcagagacagtgaaacatttcatgagtgttatgggcagcatcataaaagcctttagactttgtttttcatctggggtgattaaggtaattctgaaggaaggttgagctcaaggagagctgagatatcaaggaatggggtatcatctgttttattactccatattttactcccagtgaagtggtaaacaattaaaattcaaacacatcagtgcatataattcagttactcccagaacaccataaaaatgtttccctgatcaataattgcttattatgacatgcatttgttgtgctagctgtcaaggtgcttagctatttgctttctaaaagtatgaaaagcacgcccggctcatcagcctatgtggtaacaaagagcaatccagctgtggatgtcacagagccactcttgacctgttgtgcatagactccctccccacaaatccaaacccactaagactctccaggctctgttaacacacaccagcctggttcagcttggatgccctcctcacaccatgtgggttctgattttccatgccaggcagtccatcttaaatggatgcatcctcaccgtgtttgggcttcaacttcctattctggacctcctcggctactccctaccccaaggcatggagggctgccttgttctgatgcaccttatgattttagcaccaaattgtacaggaagggagagaagggaaaggagaaagaagatgtgaaaggaaagagagggtagggaagaggaaaaagaagatgaggaacacgtattattttctaatcctcacaataggtcctcaaaatgagcaacatttccccctatttcatacttgaggaagctgtgactcagagagactaaggcacttgcccaaggtctcttagtacattaaggagccagcgtctgcacccagttccttctgactctagagcctggattctgctggctgcaccacactgtctttaaagagaacactctcaaaacgcgcttggtctttggattgtctcaaatgtgttagaatagtgttttaagaaaaggaatgcagatctcctgggaagcaataggtcgagttcatttcatgagaatcatttttctagccattggcctacttccccatttttctcctgtctgcatctaggtgcaacaggaacttggctttatttgactccattgccagggtggggtaatgaagctgggactctcttgtagccagcggcagtgagccagcagtctcactgcctacccagtgatggttccttctgtggccagcacttctggaatgagtcatctttacatgtttgccaacccttgtcctctcctccccagccaggttcacccttgctgctgtcaaggagctttgagactttctgagatttttaaatggggaagtagatgttaaacctagtatgaggaagagagggaaagtttgctctggtttcaaacacacagtcatagaagatgctagtcttaatgctttccatagcaaaaaccctgaaggcttagagtgtacacattgtgaactgaacttttaacattattgtgtaactcatttgttaatgcctatttgtcattgactgtggggtccatgtgaaaaactcccacaaacactctaacaaaatggaagacagaaaagaaagcaagcatcatttgtgtacaatagccaaagaacaatagccaaataaatttgatggtctcaaaagttaagcatcttttgaagagaaaatttgattttagggccaggtggggtagctcatgcctgtaatcgcagcactttgggaggcagaggcgggtggatcacctgaggtcaggagttcgagaccagcctggccaacacggcaaaaccccgtctctactaaaaatacaaaaattagctgggtacggtggcgcatgcctgtgatcccagctacttaagaggctgagacaggagaattgcttcaactcgggaggcggaggttgcagtgagccaagatcatgccgctgtactccagcctgggtgaaggagccagactctgtctccaaaaacaaaaacaaacagaaaaaagaattgattttgattttttcagatacagtgcatgaactttttatcataaaatattaaagctggggaaaatatcttagaattcacctcatgttcatgctttaccctgtgaagaaacagaggcacagagagaaataacttgaggataatggaaacaagcacacatctgtaagtgtgtgtgtgtgtgtgtgtgtgtgtgtgtgtgtgtcagagagagagagagagatgttcctttgtaagtaaacactcttggaaatagccgcattttattataacacaaaaagtaatgctaaagctgatatagttctggttgctaagcttcacacacaaaaggtctttaggtagctgcttcctaatttttatttctgtggcccaaaagtctccttgtaaaccttcgtgtcatgtcatactaaacctttgacatcaataccctttaaaatgtacaagtccttaaaaaaaaaaaaaaggcaaagggcaaatactaatgtgggaaatttgaattttaattaactgtttgtttcaatgttaggataaattaatgttagataaattctttggtaatttttccccctaaaattggatttttcaagaaacatcactggttcagtatattgttatttggggtagcataattttaggcgataacttaatatttgcatatatttgtcactactttgagttggtttttgtcccctgacccccagccaggatgttagatcacacagatttttttttctttgagcccttagggagagtccaaaacagtcacttcatgtactaggaaagtttacccagtcagcacacacagatatgttgttgcctacatttatatttgtgagagtgactgttaagaaactagcaggtttataaaatccgtgtgagaatttctctcaaataactgttaatggacaatccagcaatcctcccatctcaggctcccaagtagctgagactacaggcaggtggcaccatactcggctaattttttgtgttttttgtagagatgcggtttcaccatgtcacccaggctggtctcaaactcctgggctcaagtggtgctcccgccttggcctcccagagtgctgggattacaggtgtgagccactgcacccagcctgtacattttccttgaaatcgtttttggatgtttagtcttatttccttattcagagttcacctgtttattttttttttcatttccccaatttagcctgcgtttcacccagccctagcaatataggtttgggtcagagaaattcaagcggccaggggatgctgaagatggcccattatggccgggcgcggtggcacacatctgtaatcccagcactttgggaggccgaggcaggcagatcacaaggtcaggagatcgagaccatcctggctaacacagtgaaaccccgtctctactaaaaatacaaaaaaattagctggctgtggtggtgggcgcctgtagtccaagctactcaggagactgaggcaggagaatggtgtgaacccgggaggcagagcttgcagtgagcagagatcgtgccactgcactccagcctgggcgacagtgagactccgtctcaaaaaaaaaaaaaaaagatggcccattgtggtaagccttgacttgaattagtcaccaagctagtcttatctcttttctaggctaattcttgttttttgtttggctcaaaacaaattgtttgtcttcagaacacaataaaatccagggagagtgtcctgttcttcctacagacgtcactgggacatcttattctttaattaattcagtcaactaaaattggtcaaatacctgctctctgtgccagagttataaactttgtatttgtataattgctagtagctctcttacatttcttactttatctatctggcatttgatctacctaataccttccaatatcacctcatgtccctttaccagcttggtggtttttctatagttcaggaaatcaaacaaaatggtgtgtgacctggaggtactagaaaaacaatagcaaaccaactccaaagccagcagaagaaaacaaataaccaaaatcagagctgaaaaaaattaaaacgtgaaaatccatacaaaagatcaatgaaaccaaaagtttgtgattcaaaaaaaaaacaaggttgatagatcactaactagattaataaagaaaacaagagagaagatcgatccaaataagcacaatcagaaatgacaaaaatgacactacaactgatgcctcagaaatataaaaaatcctcagagactgttataaatacccctatgcacacaaactagaaaacgtagaagaaatggatagattcctggaaacacacaagccccctaaaattgaagcaggaagaaattgaaatcttgaacagaccaatagtgagttctgaaattgaatcagtaatacaaaacccaccccaaaaagcccttaatcagatggattcacagccaaattataccagatatacaaagaagagctagtaccaatcctactgaaattatttcaaaaattcaaggaggaaggactcctctctaactcattctgcaaagccagcatcattctgataccaaaacctgggagagacacagcagaaaagaaaacttcaggccaatatccctgatgaacatcgacacaaaaatcctcaacaaaatactacaaaccaaatccagcagcacattgaaaagttaattcatcacaatcaagtaggctttattcctgggatgcgaggttggttcaccatacacaaatcaataaatgagactcatcacatagacagaattaaaaacaaaaaccacaggataatctcaatagacacagaaaaggcttttaacaaaattcaacatcccttcatgttaaaaaccctcaacaaattaggcattgaaagaacatacctcaaaataataagagccatctattattcaactatccacagccaacatcatactgagtgggcaaaagctggaagcgttcctcttgagaactggaacaaaacaaggatgcctactctcaccacttatatcaacatggtactggaagtgctagccagagaaatcaggcaagaaaaagaaataaaagacatcccaacaggaagagaggaagtcaaactagctctgtcacagtgcaggcaatataattctgtacccagaaaacactgcagaccctgctaaaaggctcctagaactgataaacaacttcagtaaagtttcaggatacaaaatcaatgtacaaaagtcaataacatttccacacaccaataatgtctaagttgagggccaaatcaagaatgcaattccatttattttatccttttgaataaaatacctaggaatacagctaatcaaggaggtgaaagatctctacaatgagaattatgaaacacactgaaagagatcagaggtgatacaaacaaatggacaaatattccatgctcgtggataggaagaatcaatattattaaaacagccatagtgcccaaagagatttttagattcactgctattcctatcttaattagcaacatcattttttcacagaatttaaaaaaaaaaacctattccaaaattcatgtggaaccaaaaaacctgaatagccaaagcaatcttaagcaaaaagaacaaagccggtggcatcacactgtgtgacttcatactacactacaaggctacagtgaccaatacagcacagtccaggtacaaaaacagacacgtagaccaatagaacaagataaagaaccagaaataaagctgcacgcctacagccatctgatctttgacgaagttgacaataacaagccatgaggaaaggtctccctattcaataaatggtgctggagcaactggctagtcatatacagaatattgaaattggacccctccttttaatcatatacaaacattaactcaagatggattaaggacttaaatgtaagacctaagattacaaaaaccctagagaaaaaaactgggaaatactattctggccattggccttggtaaagaatttatgaataagtccccaaaagcaatggtaacaaaaacaaaaattgacaagtgggacttaattaaactaaagagcttctgcacagcagaagaaactatcaacagagtaaactgataaccaactgaataggagaaaatatttgcaaaccgtaaatctgaagaatgtctgatatccagaatctataaggaacttagataattcaacatgcaaaaaaccaccccatttaaaaatgggcaaaggacatgaacagatacttctcaaaagaagacatacatgtggccaaaaaatatatgaaaaaatgcttaacatcactaatcattagataaatacaaatcaaaaccacagtgtgataccaactcacaacagtcagaatgcctgttattgaaaagtcataaaatagactgggcatgtggcttatgcttgtaatcccagcattttgggaggctgaggcaggaggattatttgaagccaggaggttgagaccagcctgtgcaatgtagcaagactgtgtctctacaaaacatcaaaataaatggaaaaaaaaaaagaaaaagaaaaagaaaattaactgggtatggtggcgtgtacctatactctcacctactgggaggctgaggtgggaagattgcttgagcctaggaattcaaggctgcagtgagctataatcacaccactgcactccatcctgggtagcagaacgagaccctgtctcaagaaaaaaaaaaaggcaaaaattaacatgttggaaattagttcagtcactatggaatgcagtgtgaagatttctgaaagaacttaaaacagaactaccattcaacccagcaatcccactactgggtctatacccaaaggaaaataaattgttctacaaaaacgacacatgcactcgtatgttcctcacagcacaattcacaatagcaaagacatggaatcaacctagatgcccatcgacagtggactagataaagaaaatttggtacatatacaccatgaaataccacacagccataacaaagaacaaaatcatgggggtttttttgcagcaacatggatgcagctggaggccattatcctaaacaaattaacacaggaacagaaaaccaaataccacatgttcttatttataagcaggagctaaacatcgggtaaacatgggcataaagataacacggtagacaccagggattactaaagaagggaggatggaagcaggtgtgggttgaaaaactgcctattgagtaccatggtcactatgtgggtgacgtcagtatcatgcatacatcaaacctaagtgacatgcaatttacccatgtaatgaatttgcacatgtatcccttgaacctaaaataaaagttggaaaaaaataaaagataagatatcccgtatcctcaataaaaataaaagtggcgtgtttgtgcacttgactttgtaacatgttttccaaagatgtctttgagtcataaaaatgggaaatacacatgttggtttctctagtcatcacttgacaacttacatgttttacctttcttatgatggtctgtctcatttcttcagtgacagggctagacattctgttttaaactcttcccacagctgtatattattcaacacaactttaacagagttcatagagtggagattgaggatgtttgcaaagttaaatcatttatttttattttttcttaaccatgtcccgcctgctttattcattattaagaacattgatgtgaagattaaatggttttctctatttttatcttcaaacgatctctatttgtggcttctgcacattgctagatttattccagccacttacactagggtcatagtttagcttcagctcggagccaaatgccccacagctgaaatgaccgcacctctgaagtggcattttcccaggccatgcctccctttaataatgagccagccagggggtaaatttgtatctcattacaacagagccttgtattaggcctggagaataattaaatgtgaggaattataattggttccctctttgaaagctctctcagcaccatgtctacacttaagccattacttttatttttaatctaatggtttgccgctctctctccctctttctctctccaaattaaatatcaaccataaaagaaaccaaggaagtccagaaatctgtggctttaaaaagactggatctcgaaaagattttcacaagacgcttccgaaacagacgtttgagtcggaaaccttggagtgcagtgaacccgctgctcaggtatttcctgtcaacaaacatggttaccaggttactgggctcttctgcccagggcatgctgtcagttttacaaactagaataaacgatagacgcatagaaagtttgagtaggaggaactttaccatctgagtcagtgattttttttttcaaacttatttgtagctgtagaaattggtgttcaaatgaaaacccagaaacccaatgattaaaatagaaaaaagtggaaaagctctaactgggggacagagacaccttgggcccatccctacgacagttcctgcagagactcttggtgcccctaaggcaaactacagagtaatgaaaagctctatgctgaggccagaatacctgcattctcctagtgattctaccatgtactaactctctaacttcaagcaggataattaaacttattgggcttcagtttcctcccctgggaaacaaggatggtaatactaactcatgaggttatttgagtattaaatgagttaatatccataaagaattagaataatgccaagtacacttagtgcctagtcaatgctggtcactgttattgttattgtcattattctttttcttttttttttttgttgagacagagtctcgctctgtcgcccaggctggactgcagtggcacgatcttggctcactgcaagctccgcctcccgggttcacgccattctgctgcctcagcctcccaggtagctgggactacaggctcccgccaccacgcccagctaatttctttttgtatttttagtagagacggggtttcaccgtgttagtcaggatggtcctgatctcctgaccttgtgatccgcccgcctcggcctcccaaagtgctgggattacaggcatgagccaccacgcctggccagttgtcattattcttataaagtaattacagtttaaaattcaagttaaagtgtacatattgtgaaatgagcttttaacactattctgtaactaattttttaaatgcctggggtcatttgaagaactccagcaaacactctaacaaatagaagacagaaagaaagcaagccttcatttgcataaaacggccaaagaacaatagccaaataaattccatgtttccaaaagttaagctctatacacctatgctcacagcagcattattcacagcagccaaaaagtagaagcagcccaagtatccatccataatgaatggataaacaaaatgtggtcgccaggggctgggggagggaggagtaggaagttattgtttaatgggtagagtttcggcatcccaagatgaacagcattatggagatggatgctggtgatggttatactgcagtgtgaatgtgtttaacactactgagctgtccaacctgcccattttatagatgagaaaaataaaattgagaagaaaaaatttgttcaagtttgcacagaacttcttgtaaactaatatagttttcagcttccatgtgtcttcataatacaggaatctcaccatgctggaaatgattcgaggtttttaaataatactaatttttcagacaaggtggtccccctaaagcaaagcccactacttacttggagcttcacagtagaatcagccatcatttccagcgctaaatatgacaggcttactgagggatagaatacctggatgctctgctctatgggagatttaaggaatttttcatcagtaattttgactgaattccattttcaccctacatgctgaccaattaaattgttcctcttaatgttagtcagatagaagccacggtaggtatttcagcagaagaaatttaacacagggaattgattaaaccggttttggaggtctgagagaaccaaaagggaaaaatggaggctatcctaaaatcgtcattatgggaaacagcacaccagcctggggctggggtatacggcagtggttctccacttcagcttcatcagaatctcccagagggtttgttcaaatataggttgctgggccctgtctgctggaatttctgattcagtaggtctggagggtgaacctcatactttttaattagcatttcctaagtgatgctgatgctgctggtcccaggaccacaatttgaggactgcaggtctaggggaagatcttggagttgtcagaacgtagaagctcagaagaggagcctgagagcaaggactgaaatccctgagaaggtactgcccagctggtggtgttgtctcaagatctcagagggaaaaacctcatgaagcctggactcacgcctcacaggaggagaaattgcccggctggtgctggtaccttcaaggaggtaagataagggtgattctggaagtaccaaaagaacctgaaggctagaaccagctgtcactacgaaggtgagaggaatagcaagaggaaggagccaggccctttgacctccttgaaccatccggtaaccctgtagtgctccctattgacagaacctaaagggagcagcagacacagcggaaatatgatttgctgacctagcatcaaagaacaaggcataaaagggtgaatttggagcccagaaacaataggtgaagaccagcgtacacacaaagcacacgctttcctgcagcatactagcagagaactcaagtcactgtgttgtgtgtggttttttttgttttttttttttttttttttttttttttttttttttttgagatggagttttgctcttattgccaggctggagtgcaatggcatgatctcggctcactacaacctccgcctcccaagttcaagcgattcttctgcctcagcctcccgagtagctgggattacagacatgcgccaccacgcctggccaattgtgtatttttagtagagacagggtttctccatgttggtcaggctgatctcgaactcctgacctcaggtgatccacccaccttggcctcccaaagtgctgggattacaggtgtgagccaccgcacccggcccactgtctgtgtttaagagccaacttgatcatatgatccagcagtctcactactagatatatgtccagaggaaaggatatcagtatatcaaagagacatctgcactcccatgtttattgcagcactattcacagtaaccaagacgtggactcaacctaagtatccatcagcagaagaatggataaagaaaatgtggtatgtatacacgatagaatactattcagccataaaaaaatgaagtcctgtcatttgcatcaacatggatgagtctagaggataagtgaaataagccaagcacagtaagactaatactgcatgatctcacttatatgtggaagataaataagttgatctcatagaagtagagggtagaagtggtaactagatgctgggaaggatggatggagaagggaatagagaggttggttaacggttacaaaattatagctagataggaggaataagttctagtatttgatagtactgtaaggtgactagaattaataataatttattctgtgtttccaaatagctagaagaaaggattttgaatgttcccaacacaaagaaatgataattgaggcaatgggtacactaattaccctgatttgatcattacacattgtacacaggtattgagatattacactgtattccataaataggtacaactattatgtgtctattaaatttttttaaagagccaaattgtacaaaagttgtttgttttgaaatattggaataatactcatcatggagagaatctcagactgcgagatgacagcaatgttttcaattccactctcattcttgtgcaccttcttattgagtagaatggtgaggccacatagctagatttataaaatttaaacaagtatatgataagattccttggtacacgtagattttataaaaattagattatattatgcataatattgcaaaacttcctttttcatattagcaatatactgtgattatctttctcttccaattaatacgtgttctttcttttttagagacagagtcttgctctgtcgcctaggctggagtgcagtggcacgatcttggctcactgcaacccctgcctcccaggttcaagtgattctcctcccttagcctcccgagtagctgggactacaggcatgtgccacgacacccggctaattttttgtatttttagtagagacggggtttcaccatgttagccaggatggtcttgatctcctgacctcatgatcccccggccttggcctcccaaagtgctgagattacaggcatgagccaccgcacctggccaggttctttcttttaatggctacataacattctattttatgaaagttccaaaatctcttaacacttcctttttgggggcatttagtttacttctattgttttgctatcacgaacagtgtttcagagatgcccttgccctcacattcttgcacacttgccagttataccctacggataaattcttagaagtgaaatttctagattaagggatgagtaatgttagatttttttacttatatgtatcttgatatccttttaaataaatttgggaaattaaagtcattttccttaaactcttataaattttaagaaaaacaaaagtattaataatcgaagtgttaatattgattatttctagcacattcagtttggggaaaatttatgatctagtagagtagtacttttgtgaggtagatgtcacaaaaaatgtgtagtatggagaaattgtccagtagtatgtccatttagtagaattttgagaataacattttgccataaattttatagatatttaccattaatccatttgtagtcctacaacatatagttgattacagttatacattttttgctgagtctttggttcaaagcatgcagttcccaattacaaagacattcctaatggaataaaacatccactttgtgactgatttaaggttgttttcttaaagcacaccgcagccaaaagtggacacagcttgaatagcaaattttttcctttttgttgttgttgcttcatccaataactgttaccaaattcccgtagaaaagtgttgcccactcccacatcgacctttggaagcataacattcagctttggtgtctatacacaatttaatttggaaggctcctcacaaatcatcttattttccagtttcaaaaaccaagttctgagtggagattaagacagggtctctttatttcccagtgcagtctcctatctatttatttgtgaatgaatgaattagttaattaatgagccagggtttcactttgtcacccaggctggattgcagaagaagtcatcgtggccaagcgtggtggctcatgcctgtaatcccagcactttgggaggccaagacaggtggatcacttgaggtcaggagttcaagaccagcctggccaacatggtgaaaccctgtctctactaaaaatacaaaattagccaggcgtggtggcgcgtgcctgtaatcccagctactcaggaggctgaggcaaaagaatcacttgaacctgggaggcagaggcagcagtgagctgagattgcgccattgcactccagcctggccaaaaaatgtgaaactccgtctaaaaaaaaaaaaaatccaatctttcctattggctttattaaatacactttaactttagaagcttagaagcacaataattagaactggcctaactttaaaaaaaattttcacaaagaaattagtaacttgtagggtcatttgtaatctttttctctgttgatttttacagttttaaaaagttaatacaataatttatttacttattttttgagacggagtctcgctcttgttgcccaggctggagtacagtggcaccatctcgggtcattacaacctccacctcccgggttcaagcgattctcctgcctcagcctcccaagtagctgagattataggcactggccaccatgcccagctaattgttttgtatttttagtagcgatggggtttcaccatattggccagtctgatcttgaactcctgacctcaggtgatccgcccacctcggcctcccaaagtgctgggattacaggcatgagcccaatattttaaaaatagtacattattacagaagctagatgtgcactttaaattattatcagaaaattagtatgacagacaaattctatgattgtcccatcatctgggcctgtgacattcacacctttgtgatgttcatccccgactgtgggtgggacctgggacttgcttctgtcaaaacaatatggcaaagcatgagaggatgtcacttgtgatcatattagatagcagccaaaatggattaaagacttaaatggggccgggcgcagtggctcacccctgtaatcctagcactttgggaggttgatggcggcggatcacctaaggtcaggagtttcagaccagcctggacaatatggtgaaaccctatctctactaaaaatacaaaaataaccagatgtagtggcggacgcctgtagtcccatctgctagggaggccgacgcaggagaattgcttgaacctgggaggcggaggttgcagtgagctgagatggcgccattgcactcaagcctaggtgtcgcagcaagactcggtctttaaaaaaaaaaaaaaggtaatcatacctcactgcagccttgaactcctgggcggggttcaagcagtcttcctacctaaacctcccaagtagctaagactgtaggtgcacgccaccatgcctggctaagttttgcttttttttttttttttaagagactgagtctcattgtgttgcccaggctagtcttgaactcccggcctcaagcagtcctcccaccttgtctacccaaggactgggattaaaggcataaaccactgcacctggcccagtctcctttttgttacaacttcctccagctctgttttgctctggtgtgagacatgagcatggttcattaagaggcttggcccccccagccccaggaaagaacaagccaacaaccgataggaatgtagtactgtttttagtcctttcctcaggactggtttgtctgcataagatgagtaactacctgcttccaggtgagaagaagacatttaattttagagtagtccagccaggaagctgagatgtcattcttatcaaatccgcagtttcttcagaagacttgaggcctggctgagattctgtagtcccaaattggagcagtcttgagacatccaagattcttcggttctcattttagacttgccgtctctctcacaaagacccactgttttctctcacaggcaggcccccgccacttaaacgtgctgtgcgacgtgtctgggaaaggccccgtcactgcctgtgactttgacctccgcagcctgcagcctgacaagcggctagaaaacctcctgcagcaagtgagtgccgaggactttgagaagcagaacgaggaggcccggaggaccaataggcaggccgagctctttgccctttacccatcagtggacgaggtgggtgccactgtttccatactggagaatctcagtgaagactctgagagtcatgtggacaattgtgttgttcattattactatatagcagcccatggtgtcagggctcacttgtatgatttctggggcctcgtttttcactcaggcaagcctgtgtgtcatagcagagccattattgattatcacacagatgggattctgataataataacaactggaattttcatagcactttacaaaatatgttcactaagagcatctcatttaatccccaaatgtttcaagggtctacatgtagtaatcacacccagcaagtcaaaccatcctattatttgaggggatgtgtggtcactaatccattgagacatacattacttaaactttgatgttctttagtgctttgttactttctttttaatggtctctatgagcaaccagagagacctgctttgaaaacatttcaggctaggataatcacagcccatgctcccaatgtatagaactttgggatcttgattgtttacttcttcatttattggagctgactgacaacaataggataatgtagactttgcctgtggtcactgcctgaggcactttggatgaaatgagaggtgacgattattcaagccttttgtctgtttgaactccttatactgtataggaggctctcagttttcccctctgcgtgaggttatctacacttctgggtcttgccagaacagattactgctatatctctgctgtccaaatggtattgaaagttcagttggaagaaacaggatttgaggaaactgcataaaagatattctatccatccatgcctctaaatatttgaaattcgatccttggattaagtgagacaatcagagagcctgatacccccacccttctggattgtgtttgctaacctgcccttcagtgagctcacgactggtcagcaaggaggacaataaaggaaacagcagtcatgagataggatatcacgtccacatggaaatactattgttgacattgacctactcaccatctagcaccttcctctttgatgatctaaagggcaattagccttcacatcttccgagaaagaagaagcacgcttctgctgagataatacaaacacttagagattgtgctcattttgtaactaactctcttaagttctttacttagagcaaacttctgtccaccttcaccaaatgtggcaacttaatgattggggtcctgaatttactccagctttcttttcttttcttatcctgattttctaagcaccttggtttcctcatctatttttattttatttgcagtttttgtcagcagcctcaaatggtcttctgaatgaggcagaatataaaaataaattatctcacttatatatagaatctaaaaaagtggatctcatagaaacagagtagaaaggtggttatagcaggggctgtggggagagggagaaggtgttggtcaaaggccacaaagtctcaggcgggaggaatacgttttagtgacctatcgcactgcacagtgaccagagttaataataatgtgttacatatttcaaaactgctttaaaaaaggatttttaatgttctcatcacacacacacaaaaggtaagttggtgaggtgatagatatgttaattagcttgatttaatctttctacaatgtatgcatagatcaaaacattacttgatttaatctttatacgatgtatacatagatcaaaacatgacactgtaccccatagatgttcacaattactacttgtcaattaaaaaataaattaataaagtatgaataatgtgagcaatatcatcatctcctttcctcagattaaaaagcaacaattaggctaaagagctttttcaagattcaacagataaattaaattacaaaatggggccctaacccgctaactacaaagttcgtgttcccttgtttatgtatctacatacatatgactacctggtatgttgggacacataactgaaatccaaatatgatatttttaaatatcatgtaactttttagtttccatccacgacattaagactttttaccagatttgtcaaaacatattaaatcagactgatttggcctttactttccttcctcttcctctcagttctgtgatggagatgccaacatgtaatagagggacccaaagtggatgccagaagagagagaacaattaaaggatgcagagaatatgtccagtgagacgtttgcttgtcagtgtctccctggtggtattagaggggagaatgttccatctgaacagattaaaataatgaaacgtagcctggttttagaggaactttgttttatgatctttgaaacaatgcagacgctccattgggactgaatgttataatctgggagcaggcctaatggggcctgcttttattgagtagagagaagtgcttcgtaattagtgttgcagttatttgtaaactggcgtgtctaaaatgcttgagggcctctataccagccctttaatattttgaagctgttgtcacagaaattgcatttgtatttataatttgtgctttctccaaagaaagttctatggaagaaaggtaaatttctgcctactctgacatgattacaaatgctggttttttcgatgacacaatcagatttttaaatatatcattacttgatttccctgtaaggaaagttagaagagaggtaaactagtatatccaagttatggctgagtctacaggagaagcaaaagttggacttaaccaccaagcttctataaggcaagttctttccctaattcattctgagtctacaaaaggcggttattctacaaaaggcattctatgtcaatccctaagaaagattccactgatactccaaattatagaaaagtttgctgaggctgttggttacaagtgacagaacccaactaaaaccaattcagaaaaaaaggctaggggagtacttcttggctcacctaagaaaatcacaggtaggcaaatgtggagttgacctctggatccattgggagagtaaatgaaagaatatcatctctctcatactgtctctttctctctcattatctctttcattccgttcatttatatatatttttaggatgatgaaaacaagaggtatccattaatgtttcacatttccactttctgtttgcttgggaattagttgccatttcagttagctataaagcctgaggaaattcatatagcttagaagagactgaggaaatatatcacccaaatgtcatatgtggaccttgtttggatcttgatttaacaaaataacagtaaaaacaaattgagacagtcagggaaatttgaaactgacaaaaattatttagtggcaataagaaattattaatttttaggcataatggtattgctgtatgtttttaaaagtctttatcttttaaagatatgtactgaaatatttatatatgtatatggtctctgggaagttgcttctatgtaatccagtattgagcgagaaaggtggtaagtgggtaaatagatgaaaccagaatgcccctgaattgaacttgttgaagctagatgatgggtgaatggttcttcattgcattgctctctcaacttttgtgtatgtttaaaattttcccaatgaaaatcttttttaaaaggatttcaaaaattagaatctagaccaaaggcagtcccagaaatccatgagtgtctctaccttcaggttgttttccagttagggagatcttccctttagatatgtctgttccaatgatcctaaaaggtccagattgccctgagcgagtaggcatcaaaacaatgtctcctctgaaataaactcagccattccacccagcaacatggccaaccgccgtaaccacaaggaatggggaccacagggagaggttggagtaatgatgagcttaccacattgatcattccatcaaagtgggtacatatttaccaggaaggtgactttactgctatttgcaagaatgttaagcttgctgtggggtattcactggaaagctcccaggaaaagacagtgagatgtgaccctgttctttggacccttgcgatgggcagagcactcaccagtgtttggaaagcatactgcaagagtgggaattactgttttcaaggatttgcactacttatttttgcatacatgaatataattaacatagaatgatagttcagatacagatgttaaggttacaataggggcttgatatttctctttaagtgtttagtttctgtgcggtaaaataaacaggtagagctcttaatttgtcattactaaatttcatatacctagcactttaggaagctctaactgcataagcctgtctagaacttgtcaattcaaccccaagtctctatcatctgtttaagaaaacagtgaactgagaaagtgactctgtattataggatcaatggtttacagccttaagtgaaccattctgactcagatttcaaatctgaaactcacatacttactagtaaagcccttgacaggagaaatattgcaaatgtgtaattagagtgggcaaaaaacacacaaaaacatcaacaataggtataagattttgcaatgccatctggtggatgttactaagccatatccatgttcacatttccttccttcctgcttcagtctctttgtcttgaatgcttgggtttctaaaaggagaaactgttttgctgcaaatgctggctttgaggttgggggttggaagagaaactttcttataaaaggcagagtgttagaaaaaaagcaaatctaagttaacttgagccgtggagggtagccttcccttccctgggttaactctaattggagctccccacagaattcactaatgatttccttacgatgtgattaaaaataggaggatgctgtggaaatacgtccagtaccagaatgtcccaaggaacacctgggcaacagaatattggtcaagttgctgaccttgaagtaagtatcaacaaacacactgccaccgctttgagatttatcttgccttttacatacaaatgttgtgtttattatcagagcttgaatcaaagcggagctcccaaaatacgtctaacagtgggcagctgtggagtagtagaaagggcacgtttgagtccattcctggattttttttctaccaacttcttgatggtcattcttctacaatagagaaggcaaacacacgtgtctactaaagttaggcaggtaaggtcattgagtgaaatgacctacattaagaaaaatagcgcttaagtcagtggtgtgctggagtcgactgtactaactcgtgagatctgacagtgcatatctcttcctgggttcggtgaagtcacattggtaactttaaattggccatggcgaaagtatttacaatgtagaaatcagccaatgctacacgtttgcaccaccctcagcacccggagattatttgtaaaacatttaccagtatgccactgttgaaacacaatgataaatgcaactgaaactcagtgccaggggacaatagggagtggtgaggactgtagtaaactatgttaagggggcactcactgctagcaacagactcttgccatccaaataaacaggcccatttttgtcaactgtcttttctattttttcaagagaagctgaaaacccagatttttctgcataatataccgactccctaaatatgttctcattccctttataaacaccatataattaaaacacgactacagtctggtttcatcttgtgggccaattatttgccacatctacttcaaagtagttgcatccaaacgtttcaattgtatactatgatagcaaaaaaaaaaaatcctctatagacatgtattaattttgtactttcatattaaaatattatctacattataaaacataatagaaattttaaagatgaactagataaatctatataaattctagtattttcttcttccactgcaatagattgtcttgtgtaccctcggagtgcctccatacctctcttcgtctctgcagactgctattttcaagaattagttctccttcaaatccacagatgaaaactttaaagttgtacatattttacctaagcaaaactacagaagcgtaacatttatttatatactattagatgggtcatccatctctcaaagtcacttcataggtcccttcagcggcccctggtttgcagtgagaaggcatctggattctggatgtaaggctgggtttcaacccctgggaacttccctgggattttgagttcttccctataaatgaagttgatagaccttatggtctcaaaattcctacctaccacaaacttctatgattctaacgcatagcctctgccaacttcttctgcctcagaaaacaagccagcaagtctgctcacacagctatgggtggtctcttgatattatagtctcctcccgctggccagttctaccagagggtcttcagggccttttgtacggagaaatgagcagcccataaaccagctgagtgtcaagtaatgggcacagaaaagcaagctcttgcccttgcaaaccaacctggcagtgggagcttcctcatctgtctggttggcgggaggactgagtggaagtggctcttcccctctgcattgtttaggaagccttcgctattgtctgagggacacacctgccccgacaggatgcatcatcaggctacttttagatgcagcgactatgtcatttgagatggcagaaattctcctctatggtgctcatagccaagctttctagacctctccagtgaatgagaggcagctgttctcacaggtgggaaaacatggtcactaagagagatatgtgttattttaaaaaaatgttaatggaggccaagtgtggtgactcacacctgtaatcccaacactttgggaggccaaagtgggaggatcgcttgaggccaggagtttgaggccggcctgggcaatatagtgagaccccctctctaccaaaaactaacagatgtgttaatttttagccctagctacattgggaggctgaggtggaaggatcgcttgaggccaggagttcaaggctgcagtgagctatgatcatgccactgtattccagcctgagtgacagagtgagaccctgtctctaaaattaaaaaaagaggagtcacttgaatatctcttaatgaaaattgtaaagtgcagtttctagtgatgtccccgcaactgccaaagcagaaattaagtcgaattgacatatttgccaggtgcacttggcctgctcatgtgttttaaatagtatctatactaacctataactgcaagagaagagatagaccaaaaagacagccctccgagtaactacttagagtaaactagatgaaagaaagaaacaaattcttataggtaagcctagaatgtgacagtatgaatagtaaaaatataagggtaatattaatggcaaatgttttcccatttacattgatatgtaggattctattcataatactacatgttttagcccctgaggaatttgtttaaagttgtagacatctgtaactgtctctgtattgcttttcagaaatatagaaaccctcaaagatacagagagaattagggtcctgccaattctgcaaatgtttgtaacagaaaaaaaaaaaaagaatgacaacaaagtatttttctgttttgtgttttaaatggagaaatattttaagatttaataccatcttatgaaaagtaatctcagctcttaggagtcttcttgatggtgaaactttaatgtgcagaaaatttgcccaggcagtttcttttaaatgcagattttggaggaccttccataacaatctccctcaagagattctggttgagtaggtctcaggtgggatcaagaaacctgcatgctggctaacttcttttgcttcaaaatgctagattctggggactacacttaaagaacaaacactcacggaaaaagcccaggttctgtgatcagagatggctgggctcaaaacctgaccgaacactcacggaaaaagcccaggttctgtgatcagagatggctgggctcaaaacctgaccgaacactcacggaaaaagcccaggttctgtgatcagagatggctgggctcaaaaccggaccgaacactcacggaaaaagcccaggttctgtgatcagagatggctgggctcaaaacctgaccgaacactcacggaaaaagcccaggttctgtgatcagagatggctgggctcaaaacctgaccgaacactcacggaaaaagcccaggttctgtgatcagagatggctgggctcaaaacctgaccgaacactcacggaaaaagcccaggttctgtgaccagagatggctgggctcaaaacctgaccgaacactcacggaaaaagcccaggttctgtgatcagagatggctgggctcaaaacctgaccgaacactcacggaaaaagcccaggttctgtgatcagagatggctgggctcaaaacctgaccgaacactcacggaaaaagcccaggttctgtgaccagagatggctgggctcaaaacctgaccgaacactcacggaaaaagcccaggttctgtgaccagagatggctgggctcaaaacctgaccgaacactcacggaaaaagcccaggttctgtgaccagagatggctgggctcaaaacctgaccgaacactcacggaaaaagcccaggttctgtgatcagagatggctgggctcaaaacctgaccgaacactcacggaaaaagcccaggttctgtgaccagagatggctgggctcaaaacctgaccgaacactcacggaaaaagcccaggttctgtgaccagagatggctgggctcaaaacctgaccgaacactcacggaaaaagcccaggttctgtgaccagagatggctgggctcaaaacctgaccgaacactcacggaaaaagcccaggttctgtgatcagagatggctgggctcaaaacctgaccgaacactcacggaaaaagcccaggttctgtgatcagagatggctgggctcaaaacctgaccgaacactcacggaaaaagcccaggttctgtgatcagagatggctgggctcaaaacctgaccgaacactcacggaaaaagcccaggttctgtgatcagagatggctgggctcaaaacctgaccgaacactcacggaaaaagcccaggttctgtgatcagagatggctgggctcaaaacctgaccgaacactcacggaaaaagcccaggttctgtgaccagagatggctgggctcaaaacctgaccgaacactcacggaaaaagcccaggttctgtgaccagagatggctgggctcaaaacctgaccgaacactcacggaaaaagcccaggttctgtgatcagagatggctgggctcaaaacctgaccgaacactcacggaaaaagcccaggttctgtgatcagagatggctgggctcaaaacctgaccgaacactcacggaaaaagcccaggttctgtgatcagagatggctgggctcaaaacctgaccgaacactcacggaaaaagcccaggttctgtgatcagagatggctgggctcaaaacctgaccgaacactcacggaaaaagcccaggttctgtgaccagagatggctgggctcaaaacctgaccgaacactcacggaaaaagcccaggttctgtgatcagagatggctgggctcaaaacctgaccgaacactcacggaaaaagcccaggttctgtgatcagagatggctgggctcaaaacctgaccgaacactcacggaaaaagcccaggttctgtgatcagagatggctgggctcaaaacctgaccgaacactcacggaaaaagcccaggttctgtgatcagagatggctgggctcaaaacctgaccgaacactcacggaaaaagcccaggttctgtgatcagagatggctgggctcaaaacctgaccgaacactcacggaaaaagcccaggttctgtgaccagagatggctgggctcaaaacctgaccgaacactcacggaaaaagcccaggttctgtgaccagagatggctgggctcaaaacctgaccgaacactcacggaaaaagcccaggttctgtgaccagagatggctgggctcaaaacctgaccgaacactcacggaaaaagcccaggttctgtgatcagagatggctgggctcaaaacctgaccgaacactcacggaaaaagcccaggttctgtgatcagagatggctgggctcaaaacctgaccgaacactcacggaaaaagcccaggttctgtgatcagagatggctgggctcaaaacctgaccgtgccagtccctaactgtgtagactttggcaagttccttattccctgggaaccttgctttcctggtgtgttaaatgcagataatatctgcattacgctgtagttgtgtaaagagactgatgtgtggaaagcacttattataacacaattttaagtctttaataaatgtcaattctctttttctttctcggaaccacagaggacttactactcagtaccaacctaagtatatcacagcaatattcaggccctttgtgtagtagggagtaaacaattaaatatagattgagcatgccaggcagcagctggtgagcctaggcccaggaaagcctccaattggcctggtgcagtggctcacacctgtaatcccagtactttgggaggctgaggcaggtgagtcacctgagctcaggagtttgagaccagcctggacaacatggtaagaccccatctctactaaatatacaaaaattagctgggtgtggtggcacatgcctgtagtcacagctgctagggaggctgaggccgaagaatcgcttgaacctgggtggcggaggttgcagtgagccgaggttgcaccattgcactccaccctgggtgacaagagcaaaactccatctcaaaaaaaaaaaaaaagaaagcccccaattaatgtgcaattacctaataatagaaagaataatcatagaaatcctcaacactgggcttttcggtggtaaaatgtatgtaacataaaatctaccatctttttttttttttttttttttttgagacagagtctcactctattgtccaggctggagtgcagtggcatgatctcggctcactgcaacttctgcctcccaggttcaagtgattctcctgcctcagcctcccgagtagctgggattacaggcacttgccaccacgctcggccagtttttgtggtttagtagagacagggtttcaccgtgttggccaggctggtcttgaactcctgacctcatgatccgcttgcctcggcctcccaaagtgctgggattacaggcatgagccactgcgcctggccaaaatctaccatcttaaccatttttaaggtacagttcagtggtgagtacattcacattgttctgcaaccatcaccaccatccatctccaggaatttttctcttcccaaactgaaactctgtacccgttaaacaataactccttattctccctactccccagcccctggcaactcccattctactttctgcctctatgaattttactactctaggtgcctcatgtaaggggaatcatgaagtaactgtctttttgtgactggcttcttttactcataatgtcctcaggttcatctatattgtagtatgtatcagaatctccctccttttatggctaaataatattccattgtatatatgtagcatattttgttatggcctcatatatgtatctgttcatggacaagtgggttacttccaccttttggctattgtgaatagtgctgctacttggcattgtttttaagatacattcacacacatcattatacgtgatcctcacaacaaccaggaaaatggaaaggcaagcatccttaccttattttgcagataaataaatggaattcagaaaggcgagtaacctgattagggtcgcagaattagcagatggtggaggaggaacagagtccaggtctctgcctgggtgccctgggagtctgccatgattccaaattgcctcatttccaaaggcgccatttgagcaaataaccctttttgtctgtgctcatattctgtccaaatattcttctaaaaagtcctcttttgagacaaagctatccattgatgaggacatcctctcacacatacctggagacaaaacatgactttattgacatgatgtctgaggtaatggtggactggggcccttttcctggtgctctctgcaggtaacatccaaagccatgggacatcaagctgagaaacttggaagaccttcaccagtgttccatgtgcacctgtaatgtccaccaagatactaaaggcaaataatgcaccaggattatgctttgggattcaccgtttcgaggggaattggcaattagggccaatatgagggctcatctttctagctctcatggggcccaggcacctcagtgtttatctgctgtgctcaagcccctccctgacctcaactcagcaactccccagtaatggagttaggaagggccagacattcatccccatcaaaacccagccttcttctgactgtcccactacaaatctaaggaaaagcaattgaacttttcttttgttgccatctgaaaagccccattccttagaattgaataatacagattctatcctttaaatttttttatttcaatggctttagggtaagtggtttttggttacatggatgaattgtatagtagtaaagtttgagattttagtgcacccgtcacccaagcagtgtacattgtacccagtatgtagtttttttatccctcatccccctctactctcctgcttctgagtctccaaggtccattataccactctgtttgcctttgtgtactcatagcttagctcccactaacatacagcatttggtttccattcctgagttacttcactcagaataacaacccccggctccatccaagttcctgcaaaagacattaattatttccttctattttatggataagcagtattccatagtgtatagataccacattttctttatctactcattggttggtgggcaattaggttggttgttggttccatatctttgcagttgtgaaacagatactatctagcaataaaatgtgaaatgtgaacaagtccattacctcagacagaaagtctaccctctgaaaacacagtagttacaataagaaggtgaatcacactaaaggtccattcagcccactctctcttgcagtgagtgagtgaatgagtgagatattccaaaaatatccaccatgcttttgtaatgtccaccatgatctcaaatgattaggaatttttcacaaacctcctatatttctctattaatatcccagtgcgattctcatatacttggagttttccaaatatttcgggaaactgctcatatttttaaccagtttatctatctaggtgttttcagaaaattcaaaattatctaactcaaagccacatagattttcctctctttctatggtaggttcgagattgaaattgagcccctgtttgccagcattgccctctacgatgttaaagaaaggaaaaaggtaagaaagcaaagaaaaatccatccctaaggcacatatattgttcatgattctttgcatgtatgtttttaaatttctttgcagcaagaacctatcagatttgaaagcaaatgatctttgatgagtccagttctgttgcctttgcaatttttcaagcagtggtctgagaatgtaatttatgatctttgaagaattttagagggagaggctactggaggtgctggcctggttggaatagagaaagaatgaaatagcgcatggggttatgtataaaacaaacccatttaaatacatttttaacaagcttggatgcgcatgtaaagcttcctcagtttgagagttctttgcactgtgaaataggctcatgactgaagggcatcttacatggtagaggtctcaatttgtcacagagttcagaccttaccaactgtaatgtgcttttaatgaaaacagtgaccaagacctctcgtgtgtttttaatgtttagtcattttgtgactcctagaagaggacagcaatagcaaatccagagtaggatggacacttctgcccttctttacccataatcattctgtatttaaggaaacaagcatctcctgcataaatattaataatcactgagatttgtaggataggttaactgctaaaacaagcagaacccaatctcagtggtttaaagcagtagttctcaaacttgagcatgcatcacaatctcctggaggacttgttaaaacacagattgctggacctcacccacagagtttctgattcagcaagtccaggtggggcctgagaatttgcatttctaacagtcccctgctgatgctgaagctactggtcaggggaccacattttgaaaaccgctggcctataagcaagaagttgctgtctttgtttctttaaccatccagggtgggaggagggacccctctgttccacgcagccactcagaaatacaggctggcagtggctcctccatcttcagtatgttctctccccaaattactcttgtcactgccattgctgcccctgaagaagagaaaagaaggatggaggaggcctggaagtttgatacattgcttctgctaacaattcactggagagaattgagtcacatgatcacccctcattgcaaaggaggctggtaaatgtagtctctgcctgggcagccactcaccactaaaattctcatggtgatgaaggagagaacccaaccatacagtggctcttaagtaatacgacactaagagagccaggagcactgttcacatcatgctcttgctcagaatcttcactaagattcattccctacaaccaggctttcttcatgatggcattcctctaccttctttccatccatagtctatgcagagtcaagctagaccgctgactaagcttcccccagccgttcaagcctctgagatatttattcatactctaatctctccctggcacatcatcaccttccacccctgcctatcagaatcttctaaggcccatccatctccagtgctgcttccatgaaaagttgtccttgtcacccaactgcaaatggcctgtcactctggaacttccacagtgcttctttgtatgcatgtggtgacttgtattttgcttttactgtagttagttacatgtttaccttttccctcacctttttttttttttttttttgagtcagggtctcactctgttgcccaggctggcatgcagtggggcgatcttggcttactgcaccctctgcctcccgggttcaagtgatccatcctcccacctcagcgtcccaagtcgctggaaccacaggcacatgccaccatgctggctagtttttgtattttttgtagaggcagggtttcaccatgttgcccaggctggtttcaaactcgtgagctcaagcaatgtgcccgccttggcctcccaaagtgctgggattacgagtgtgaaccaccacacccagtccttccctcattcttgattgtgaattaattgagagcagaggtcctcctcttctgtagtgaagtaactgatactcaggaaataccggtgggttaataaacatttaaatgtttcaaggaacatctctcaaatggctccagaatacctagacattgtgacaaaacatttgtcagatttatccaggagccactttcctaaaccacatctgtgattattacacttactccttcagcaaaatttctctgtggtgtttttactcctttttaacatgtttaaaccatgaatgcaacaggtctaacttatatttcactttgctgctcatttacagatctcagaaaattttcactgtgacctgaactctgaccagttcaaaggatttctgcgagctcacacgccttcagtggccgcatcaagtcaggcgagatctgcagtcttctcagtcacctacccgtcctcagacatctacctggtagtcaaggtaattcagtacgatctgatttgcccaatctgatgttttcattgctgtgttgttcccagcacatgtttggggtgcacgcaatctcagaatgtgtccacatatcctctgagattcactttgtttccttctcagtttaccccttttccgttctaagtaaactgtttcagatactagaaagactaggttttggagacacacagacctaggtttgagtcctggctttacaacctagtaattaaatggcattggcagtttcctggtctttctgagactgagtttcctcatctgtgaagtggagataatcacactgacctcagtggatagtcatgactacagaataaagcttggcacatcttgggcacccttctcctaattaaggagagttccctcagtgacctggtgcaaagaagctgctgtggagaaaggaacaaaatctctgggctagagtttcctaacgatgttcatgttgctctagagatgcatagttacgtgttcccaagtccagcctcttacaagctgaagcgtgggctgtggttttcaagtttcatcctccttttttttttttcttcttaccatgtcacagactgtctctaatgagagttgaaatctatggggcaattgtaagtagaagagcctttcattctaggctatactctttgctgttgtaagaaaaccagatcctttctctgtacaccaaaatgactggttagaaattaacaaacatcaggtattttacctaccttaggccagataattggtcttattgattcttttttttttttttttttttttttttgagaggagttttgctcttgtcacccaggctggagtgcagtgtcaccatgtcggctcactgcaacctccacctcccgggttcaaacgattctcctgcctcagcctcccgagtagctgggattataggagcccaccaccccaaaccaggctaatttttgtatttttagtagggacaggatttcaccatgttggccaggctgatctcaaactcctgatctcaggtgattcacctgtatttggttcccaaagtgttgggattacaggcgtgagccactgtgcccggccgtaaaatcattgtaaaaacaaaacaacaaattcaggtgtctgatttcatgtgcccccagcctcttaggtttggaacattatctagttagtacagtgttttatgtctgtagtctcagtgatcgccccatgatctcatggattccaaataattcaggtagctttgaggtcacttaacagatggcaaatgtcttttcactctagcttctttaacaccatataacaaagattatgagaggttactgtagcttgaggggaacttatttaagcttatagaagtatagttaaaattatattgctgaaaagacacttctattgttgtcaaacttcaatgtgtctccttttcgttgcaatattacttagacatacaggaaaattaaagcccactatgatagccctgtaggtaagttcacaattctctgtcagcctaggaaactgaagaagccaacactagttctatagagccaaattttatctcaaactctacttcccagtggatgactttctcttgattaatccgtcatattctgccaagtaacagtggttacccattggttcctatcacttactaaatatgttccaaaattttcaaatgtataaatgtgttcatttggcataacaaacatactaaagtgtttggataggtttaagaaattgaaatctactcagcaagacagcccctggttggctttctgtttgcttttctttatcgtaatgccatcattgttgcttctttccctttaaatatatagtaaatggtgttaaactatttagcacatccaggcagacattatttggtaagaggggcttctttcttttttgtttatattcccaggccgaacatcagggtctttactgtattttaggtagcatcatctagttcaggtgttgcatataatacggctttaagggattatttccgcttaaaagtttaattcaagattttgtgaaatttttttttaaaaagaatttgttttacaatcaaggaaagaagagtgaaaatgggattgaattggaaacttttcaaaaattgtttaaaaattggtatgccgtgcccaatttaaatatttcataagttgcgatgggcctatccttatgtaagggccacatagtttgagaaaacacaaagcagagagcctagcactttagaagtcttgcagatgttaaatttcccatcttaaagagtttacaatccagttaaaaaaacaacttggcattcaaagaaatgggttcaaattcctattttgctacatttgctgtgtatggtagcaagtttagtctgtcagtctaattggacaatgatccctgtgcctgagtggttttgaagaaaattgaaataatgtatgtaaaaacacctaccctgtacctgacataccataattaggtaaacaataaatggccatgaaatatgaaaaaaataggtatgccaagtgttaatcctaccccttctgaatagagcagaaagtagtctgttcccttaagaaaagttttaggttaatctgataggcttatttgccctactttccatggttatgaggagtcatgcatttcattacacacttttgcataaatcatgagggaacaaacaataggttctcatgtcggtctgcagctccttctcatgaagtacctggagttctccttgcccactgcagccagggcatagtatctgctggtctggtcaaatctgacttctcctgcttcctgtatgttccatgatacacactactagtgcatgaagccgtggcattccccttccttgcttcagggtcctaattaagaagttcttcatctctgttcagaatttattctaaagaccacatttttaatccattcacttcatggaaaaattagcttccttccaatttgttctacaagctcctgactatgagcttcaggagaatgggggcagtgtttatcgccaccttatctcccagctgctaccatatagaaggtactcaacaataagtaaacgattgctgattagcaggaatactggtcagtttctagctcaagtgttacgtgcttatgttttcagtgtggtgcatctctcagtgggattcgccttctcttcatgctgtggcaatgggagggggttttgaacttctttgatgagaagagagacttcctgcttggagtcctccctgaagcagatattcattgagtagcctcatgctgcttcctttgaaaccccataaatgcccctttatcatgggtattgttaaatactttgtgcctaactcacagcacctattaagtatgtgtcccttttgtactgtgttgacccaaattctttcttcaaggatcatctcaactgatgggactaaatccactggttttactcttcaacatctaagttaaattttttttgagcagagagttaggaaatttcaaatttctccttgtctttcttttaaatatggtgcccaaatttatgacaactggccagccagtcactttacctgaagcaagacagaagacacttcattcattcttattaccagcattcattcctatcaacagccagttagcaaagcaagaagctgcacatcccaatgcttttgagtttctttccaagtctgttaaatccagagaattagccctgataggaattacaagggagacaattacagataatttattcggttcagtcattcattttgtggaaggttttagtccctaacccaactttcacagagaccatatctcttttttacattgtaagcaataataaagaaaatgagttttccacttcctacgtatgtctcctgggttttgttttataaaataacttttattgctgtttttattatatacataatacatgtttattgtttaaaatagaaaatacacataagcaatgggaagaaaataaaaatcacacataatcccaccatagaaagttaactactattaacacttgctgcatttgctgagtatctactgtcacccttttaatatgcctttatgatttgttaaataaaattgtatgctattctttatataaattttttaataaaaaaatatgtatcacagatagcttcctatgtcatcaaatattgtcataaaatgtaattttgatggttgcatagattcctttttatggatgtaatttatgtgccttattttaatattctttttattggtagattgaaaaagtcctgcagcagggagagattggagactgtgcagagccctacacggttatcaaagaaagtgatggtggaaaggtatggtaatttgagtgttgttaaatggagacatcttagaagaagcaggtattttcagaagtgttacacaaatagttaatgggctttagtccctaatgtgtccctatataagacactactacattttaattaaataaaagaggaaaagaaaactggtcaccgatgatgactttttttttttttttttttttttttttgaggcagtgtcttactttatctcccaggctggagtgctggagtgcaatcacggccccctacaaccttgaactcctgggcttgaatgatcctcccccttcagcctcttgagcagctggtactacaggcacatgccaccatgcttggctagttttttatttttttttagagatggggtctcactgtgttgcccaggctgctctcataattctggcctcaagtgattctcctgcctcagcctcccaaagtgttgggattacaggcatgagtcaccatgcccagcctgatgatgattttttagagaaataaatccttgaattttctaatgttgacatacagcaaggtctgactgcataacttgattggggcaaggccaccccctgttgtcttcattctgaggctctgactcagctggttgggaggtccgtggagaccccaaaactaaacagtgccagagctctcctggccttcctcaacagcatgggccgctgccctttcaggtatgcaaataactgggaattggctgccactaccatgcattatatatattcattagcacagcataggtgttgagcctatgaaaaggatatcttttctcaacagcaatttgcaaagattcccagtgtgatttttaaaacatggccttggccgggcgtggtggctcacacctgtaatcccagcactttgggaggccaaggcgggcagatcatgaggtcagaagattgagaccatcctggccaacacggtgaaaccccgtctctgctaaaaatacaaaaaattagccgggcatggtggcacgtgcctgtattcccagcttctcaggaggctgaggcaggagaatagcttgaacctgggaggcggaggttgcagtgagccgagatcgtgccactgcactccagcctgggtgacagagtgagactctgtctcaaaaaaaaaaaaaaatagcctttctggaataagacttaccttattagtattgtactctacagactcataaatgtcaagtaagatttattgaactcaaggcattttttttttaaaatctgtcttttattctgaactcagaaagaacaccttggaagtattgtaaacttcctaaggagttgttaggaagctttttagaattttttggagttttccaaggtgacttttggagaaacaggttcacttgggagcttggtagatgatatactaaacttgatttcaagattcttttatgcaaatccaagtcacatagctagccaccaaaagaattgataatctgatgtaatgagtctctttttgttttcgttagctaaaaatgtattttactaattaaatgtagcctttttgtaaactcctcgttttttaatctttatttccttatcagctagacccaagtgcatcatttttctgcctattcactgtttttattttttagtgggaagatatgtttttactctttttaatcagtagggtttggattttggagatggctgtcatattcaggtcagaggcagttgacttggtgctgatgcttgtttcagcttgtttctttccattttcctccagagtaaagaaaagattgaaaaactaaaactccaagctgaatccttctgccagcgtttggggaaataccggatgccctttgcctgggcacccataagcttatcaagcttcttcaatgtctccacccttgagagggaggtaactgatgtggactctgtggttggtaagattttcacctgcagtgggaaagggagggctccccagtgtgcgctgcccaggtccacagcttactagcggggactgggggcacagtgaggtgtgggaagtggggaggcagaaggagataaatagaatgaaacactgttatgactggattacgtagatttggacggtgatctccaaaagaaattatcacgaacattggtgaagattaagtatactcttatagtaagattttctagatggtatgacactttaaaaagctgatttttgctagccacccgctctcaaaagtaaaactttaacaagaaaatgtagtaaccatctgtagtgtgttaagcagagacaccatggtcgactcctaaacctaaaaaaaaaagcctctgttacaaaggcttcaaaaagcaaaactcaacaggaacagggcgtggtggctcacgcttgtaatcccaccactttgggaggccgaggtaggcggatcgcttgaagccaggagttcgagaccagcctggccaacatggtaaaaccctgtctctactaaaaatacaaaaaatttgctgggtgtggtggtacacgtctgtaatctcagctactcgggaggcagaggcaggagaatcgcttgaaccagggaggcgaggttacagtgagccgagatcaggcctctgcactccagcctgggcaacagagcatgactttgtctcaaaaaaaaagaaaaaagagaaaaactcaagtttcccagcaaaatttccagttcgttaaagtttactttgccaagtgcaatgaaaaaatgggcatccaaagaatatttactgttttagtttatttagcatatttctttttcgtcatctcacccgtgatctgaatcattcattcctacactgcttggtgtagaaattttcaaaagggttgcaaattttcaagtagacctgcccatatcacctgtggtggggtttctctttccctaaatgcttttgtatccaccaaatatagaagtccatgttcacatcttttcatgcattccttaagctaaggcttaagccacttctgaaatactaccttgagcagggaagtggaggaaagggcattttgtgattgctgctgctattttggagttactggtacataatcaccagtcagaactcctgggttatttctggttcgtcaataacaaacctcactttaccacatcctgatcttcctgccacagctttctttaatgccgtctatgtagacccaagtaacttattgataagagttatgtatagagcttagagggcacacaagctaggtaattcaggatagggcatgctgaggcctcaatcatctctaggtcaaggataacctgacaacagagactgattcttaaggagcaaccagaagatgcaaagatgtcatgtattatactgaggcagaatggcaagtttaggtgggtagaggtagcaagaaattctaattcaacatcatggtaagaattaaggataagaagatactcaaagacgggttggaactgctctagttctaagcaatttgattatttacaagagaacccatgagtttttgcaatataaaagcaacaagatctccacccaaatcccaaaaggggataagaaacaactgggcaaactatcagggtcccagcccaagtctgagtgtgatttggggttctaattcccattgggcagatcacccaaggcagaaactcagtcttgctgcctggtccacataatgagagcagaggaatgctgggattcagagtgtacacaggctgaccccagcatgtttgggtcacaatcacaaatgccttcaggggcatttgagtacatgcctctcccagtggaatgcaaatatagaaataaaagaaaagcaaacactgtgctgactaaataaagcttatcaggagaccctgttctggctatagctctggactcttgccgggtggcatttgggctaccctaatttccatgtgggaggggcccatggctgctcctggcctctctcctctggtcggaggaggattaaggacaccaacaggaggactaagaaaggtaggggccaatggaaggacattttcattcaaaacaaggatggccatattcagtgttcctgatcagtgactttaatcatacatattgtgaagttaataactgctgtgtgtttgaacagaaaggcatactttggagtgacaattgtttttcttaaagggagaagctcagtgggtgaacggaggacattggcccaatctagaaggctttctgaaagagccctctccttggaggaaaatggggttggatccaacttcaaaacctccactctgagcgttagcagctttttcaagcaggtatctcttcacattacagtgtgtctggatttttccccatactggcatgggcactggaacccacaggaggaggatacgtagtgattaagagagcaaattagttaagctcactctcttagttcattttctgctgcttataatagagtatctgaaactgggtaatttaaaaagaaaagggatttgtttctttcagttttgaaggctgaaaaatccaaagttgagggcccacccttggtgagggctttcttgctggcggggcctctctgtagagtcctgaggtggagcacggtgagcagctgagcatgctagctcaggtctctcttcctgttcttataaagccaccagttcccctcccatgatgcagattaatccattaatctgtgaatggattaatccagtcatgagggcagagtcctcatgattcaatcacgtcttaaaggctccacttcccaacactgccaccatggggaccaagcttcaccatgagttttgaaggggacattcaaaccacagcattcacaaagcctcaatttcattagccagaaaacgggaacaatagtacttaacttcatgtggctagcaggaaggtcaggtgacatgagacctgtcaagctcttcttagagtgcctggaatacagtaagtgctcaatgaatgttagctattttaactgagagaagggttaggttttgttccttgtgataccaactatcctatttgaactatcttggccaatccattcattatgctatgacaacagtctggctgggccatctccttcccggtggatctcagggtttcttggcctggctattcatgtgcaagtttccactttcactactgcttgatgtgcaagtttccagggctccctgcttgctcagagagggtgaccattccagatggtactctttgttagctcagtaaacatcaagactatttaaaaaaataaaaaacttcctagacttgtcaacggtatagagacagaaagtagaatgacggttgccagggtctagggatagaggggtggggagtcactggttaaagggtacagagtttcagattttttttgcaagacaaaagcattctggaggttggttgcacaacaaagagaatgtgcttaacactactgaattgtgcacttagaaacaggtaagatgggccgggcgcagtggctcatgcctgtaatcccagcactgggaggccgaggcaggtggattatgtgaggtcaggagttcaagaccagcctggccaacatggtgaacccccgtctctactaaaaatacaaaagttagccgggtgtggtggtgcacacctgtaatcccagctacttgggaggctgaggctggagaattgtttgaacctgggaggtggaggttgcagtgagccgagattgccccactgcactccagcctgggtgacagagtgaggctccatctcagaaaagaaaaaaaaaaagaggtaatatggtaattttatgttagttatattttgccacacttaaaataaactcgcttggtctgactctgttttggaaagttttccatagctacgcagtcttcgtggagcatttaaaggggttacattaacaaactgaaatgcaaaagggatgctgagggcgcctgtgcaccgtgccacatcatagaaatagtaaaggtctgaaaaggtttctattcagcatacatgtacccttcccaatcttatgaccttggaggacaaggtacttaactaagtctggatggtctcactgggaataagacatatctacccacttaccttactgggttgttgtaaggattggagatcatgcatgtgtgctcctgacccatcttgggcatatgtgggggtggacagcatttatacttaaccttgttcgagacaaatgtgaagaaaatgagatggaaagatgctttctccaccttcgaacatttgaagaagaaagtaaacttattctgtattgttccggggggtaatactggcatcagagggtgagagttatcggggggaagcttttggcctggttttctaatggtcagacgggcttccttagaatgcagcagatgccccatccccagaaggactgataagaggccgaggcacagtgagtcacagtgattgagaaggatttaacaagaagtggagctcagtgatttcagagctgtctataatcctaatttctatgaaagacttgtgagaataaaacttaaaggtaaaaatcttcccagaaatcgtttgtccccaacccaagagtcaaaggtgcatctacattaactctgacttttctcttggcaggaaggagatcgccttagcgatgaagacttattcaagtttttagctgactacaaaagatcatcatccttacagagacgagtcaagtcaattccaggtgtgaatgacttatctttatcctctttagctgtgccaaaactgcttatcgttagacacagtctttgtctaatgccagaatttataaaatcatgtttgccaagtgaaatgtgagattttgtgttaggggttaagaatctgaattgttctatgtctttggcaaacctattaatgtttttttaattttcttaaaggattgatttagtaaacaaaccttgtgctttagatctggtttctcagataatgagataattgtttaaacagaggagcccctttaatcaaataaaatattatacttagtattaaaaaagtaaatgtgagatgctttggtagaaggcaaaggcatcttccttatcctcactcggcagccctggaggtacttctgtagcatcctcaggtccagggaagccagtttgtgtttgtttttgtttttttgagatggagtcttgctctgtcaccaggctggagtgcagtggcacaatctcagctcactgcaacctctgccttccaggttcaagtgattctcctgcctcaacctcccgagtagctgggactacaggtgcctgccaccacgcccagcttattttttgtatttttagtagagacagggtttcaccatgttggccaggattgtctcgatctcttgacctcgtgatccacctgcctcggcctcccagagtgctgagatgacaggcgtgagccaccacatccggctggaagccaattttaaaactcccaatttttactgctagcaatgcagggaagttacttaacaatgtaaaattatactgtggtaattcaggaaagaactttaaaaatcctctaatccattccttctcattttacaatttcttgctttatattttattttatagaggctaaatctcgaaagttatcatgacacacttttctcaagctgtaggaaattagctccaaaacttttttacagtactatagtttgttcttattttcatgaaagaaacacagtgcaacaatctttcttgattccctcataacatgacagtttctttactagaacattcctattttctctctttaggcttgctaagactggagatttctacagctccagagatcatcaattgctgtctgactcctgaaatgctgcccgtgaaaccctttcctgaaaaccggacacgcccgcacaaagagattttggaatttccaacacgagaagtatatgtccctcacactgtgtacaggtaagaaacacaggctcgggctgggcgtggtggcttacaccataatcccataactttgggaggccgaggcaggaggattgcttgagctcaggagtttgagaccagccttggcaacatggcaaaaccgtgtctctacaacatatacaaaatttagctgggcatggtggtgcatgcttgtaatcccagcaacttggcaggctgaggcaggagaatcgcttgaacccaggaggcagaggttgcagtgagccaagattgcactactgcactccagcctgggagacagaaccagactctgtctcaaaaaaaaaagaaaaaaagaaaagcaggttcttggaaaaccgttgagctcacattctgagttttatttgaataacgttttctcatccttcaacctgtcttcctacttcctaagtttcagggaaatgaaatgtgatatttatgtaaccgtaggtgattgccaaatctctttctaaacatagtttacctaattctctttaacaagaaagggttacttcagatgtaattgtagtttaggattatagtggacatatgttttccagagattaaaaaaaaaatctgctagccattacctttgttctcctctgtgcagagggacatattagaaaaagagcaatgtgaccaaaatgtgctagttgtcaaaaggacaggttttcagctaaagattagctctttccaacagaatttacagcaataacataataatagcacacattccaatagcatttacagcaataacagaaagttctgtatgtgtgccagcagtacaatagccactaatcacatgtagctgttcagcatttgaaatgtggccagtgcaatggaggaactgaaaaattgattttaattaattttaatttaaagtcaagtaactgtatgtgtctactatattggagagtatggagctagacactgaaggcctaacaggttgggctgccttggtttctgaatcgcttatggtggcacctgacctattccatggggtctggaaggagtgcttgtcaacacatatctgccaaaggcattaatgctcatgcacttctttattttgagactatttcctttaatgcagaaaaggatgccttctataaaaatcatctcttccccaccatccagaaatgacattgttgttttctgtgtttttatataaaagaaatacagtggtactgattcagttgaagtcttcttttatccccagtctccagtcacagacttttacctcacctcctagacttttatcatcatgaaattatgtatttcctattttttctccttttacacacacttacacacacatctgtgaacgctcaatggcattatcttcatattcatttaaaatgtacgcaaatgacttcacactctaggtcaggggtccccaacccccgggccatagaccattactggtccttggcctgttaggaaccaggctgcatggcaggaggtgagcatcgggtgagtgaagcttcatttacagccactccccattgctggcattaccacctgagctcctcctcctgtcagatcagcagtgacattagattctcatgggagcatgaatcctattgtgaactgcatatatgaggcatctaggttgtgcgctccttatgagaatctaatgcctgatattctgtcgctgtctgccatcactttcagatgggaccctctaattgcaggaaaacaagctcagggctcctactgattctatattattgtgagttatataattatttcattatatattgcaatgtaataataatagaaataaagtgcacgataaatggaatgtgcttgagtcatcccaaaaccatcccctgccccccgctgccaccccagtccatggaaaaattgtcttccatgaaaccagtccctggtgccaaaaaggttgaggattgctgctctaggtgttatattacactttgtttttgtcactcaaaagattgatttgtttttcttttttctttttttttttttttttgtttgagtattactatggagtcgtgagtcatttttctttctacttacccagatttccacaagttttaccaatgggaactttttaatggcttgcatttttggaaatatcagtattgattcatgtaaaggtttgtgggtttttttggggtttttttcgtttttttgtttttttttgagatggagtctcactctgtcacccaggctggagtgcagtgacatgatctcggttcactgcaacctccgcctcacaggttcaaacgattctcctgactcagctgcccgagtagctgggactacaggtgcctgccaccacacccagttaatttttgtatttttggtagagacagggtttcaccatcttggccaggctggtcttgaactcctgacctcgtgatccacctgcctcggcctcccaaagtgctgggattacaggtgtgagccaccatgcccatcctgttattccttttaactgctgtttagtattcctttgtgaagaggccatattttattcatttccttgttgatacgcatttaagtctttttcaagttttcagctcttacaaacactatgaagtaagattttttgtctttgcccctctgtacacgtttgtgaaagtttctttaatatatctaaaagtgaaattaccagatcacaagtaatacacatttcagtcttaagttttctaaaattttacatttgcagtcctaacagcagtgtgagagaattcccattttccagttcctcacccatactttccagtatgacgtatgtgggactaaaatgcaaagaacttcagagctcacctgatccaagcattcccacccccacatttccagatgcacaaaattaagacccggaaaggataagtgaatggttccttgaggtcaaaaattacagcgaggtggccagacacagtggctcacactgtaaccccgctgctttgggaggctggaggactgcttgagtctaggagtttaagatcagcccgggcaacatagtgagacccccatctctacaaaacattttaaaaattgcccaggtgtggtattgtgcatccctgtagttctagctacccagaaggctgaggcagaggattcttgagcccagaaattcgaggttagccttgtgccactgctctccaaatcaagcaacagagtgagaccctatctctaaaaaaaaaaaaataatttagaaaataaaattatactgagaaatacaaacagctattcacacaggaatggagagttcttctttacagtattcaggaggtatacacttatttccccatttaatccttcctggagcagctcttcattttcaatcctcattccttacatctaaacttagtccccacgtctccctcctagaggagataagcattctcaggatgcagtagtttcgattctctattccttagaggaagatgaaggcatgaaaatgtttgcttatggatgctttgtatctttttagaaactttatcctataatcgggaaacaatgcttgtggcattggaagagacttgcatccaatgaattctgtagttattcaacttcccctcagcatttaatcacccacaggtggcatttacaatgttctctactcgttcctgcaaacattatcccttaattacatcacagtgggacttagagtgcattagtgcactgaatgatccagaaatgtaggagggcaaaggaggacaagtctggacggattacaatggacccaacttgtcatcatgagaaacagacccacaaatacagagttaatcttcttgagctgtactggccactgtagaagtgccaaggacaccccgttagaaatgccaaggccaccctgttagaaaccaggtcttggggaatgacagaagagatttctctccagtttggttgtggccccttctcttggctcacagttcttctctgtggctctcaggccaccatattttatagtctatttaaggaaagagagagataatgaacttggtttggaatcttacttcatgaaaatttcacagaatttaggaagcatcttgtctaaatatcttgttctaaatttttagtgttcttctccagtccttgtgtgctttagggtggttttgattagattgggcttgacagttacccagtcccagatgagtgtcccctttcctgcacctccccccattcacgacatggaaatggaaagaatcgagtgaggtctgaaccccaggtaaaattggcaagctgactaagttcgccttgggtgacctcaccttttcatttctgtccattttcctctctttttgttccttgccatctccccatatctcaaaaaacctggaccttgtagcttttctatactggcccccaaaataaaagtctcttttcaagcaacgatctctaaactcatttgctatggtattgataacaggtatggattagtcttatcactcccaagagtattatcattttgggccaggtgtggtggctcacacctataatcctagcgctttcggaggccaaggcaggtgaatcacctgagtgaggtcaagagttcgagaccagcctggccaacacggtgaccccttgtctctactaaaaatacaaaaagtaactgggcgtggtggtgggtgcctgtaatcccagctactcaggaggctgaggcgggagaatcgcttgaacccaggaggcagaggttgcagtgagctgagatcctgccattgcactccagcctgggcaacagagcaaaaaaactctgtctcaaaaaaaaggtattatcttggcagggacagcagttcctatttcttaattgaagaaatccagatttcttctcattccaagagtctgtcaggtaactttcactgttgatgttgctatttccatgccaatcaataatcctgatcatacctgtatcccttaaggaaatcaaataactgaaaatgaagatctgtggggcagataaattcaggaatatttcttcgtttatagaggattcacctcatgaatttgaaatatggcttggcttataaaaagttgatctgcctggagcttgtagctaacacctctgtcgggccaaacaataaatgcttacactgagaaagccaggtttgggatttcaaattaatgtgcccttaacataaactgcagagcccccctgggtggagggaactattacctggttctaatagcagatgttttctggccttgagtgccagtggtaaccagagtcacacattttaggattttggtattgatgagggtttcagctgaatattacttgagttgaactccagttatctttacctgtcttaaaggagcagctgccatagtgcctcaggtaaagttggcttgggataggctggcattgccttccagtccccagcctcaccttcctcccacctcttcactgcctcttttctttgccctgccccttcaggtgtcctgcgtggggcaccattcgagttgcattctagtgtattaggttggtgcaaaagtaattgcggtaatgtgtgtgtgctgccccgtgtctctaccttattcaagtttctttaaggaacagctgtagatgagttctggtagaactgggtagtgctcccagaagtatccccgtgggtccgtgagggttgggcattcataaaataaatccttgctctaacgatagagaccaacttctagagccagaagtgctcatcccaggaatgaccaggggctcccaaaccagcggctcgggccctctgcagtgccatgtgcagcctctgtgggttagaggcatggagctagagcagggtcctctgaaccagagccaggcaggacactctgagaaatcacaagcagaaggacagcaattctgaaagcagagcagaacagctggaaaaactgagctgatgaaaaggattatccgaatccaagcttggcgttccttgctctgtgtccagattaagaaaatgctagtggtttgcctaggaacacatttgcaccaactcctggcttattttccatgtgacccaacagctggtactagagacaccagctgctttctggtgggggcagaatgaaaacagcatgggctgaggccaaggcccagcaaggtcttcaagggcatcctatcctgcggccgccagaggggtatgtgcggagatcacaggcaatgaggttgtaatgagctgttaagctccctgccgtccctttaatgggtgattacagtaaaaagagccacataaagtacgttttcatctctcacttcagcccccgagagcctctgaggtcttgtttatccaattatcagacttgctgtggaggacggtgcttgctgagaacaagcatatcagttggaacatgatttctctgatggataattagctgttttcaggactcctcctattcagctgaatgttctcagaccagaagtctgatctggcctaacggggatgtgctcccatatcgcagtggagtcttaaggagtactacccaccttctcttctgcgggggaaaaggaatggcgtagcatgcatgcaggacctgaccggaaggaatgtctgcgagttatgatttagtgactagaacttctaaggaaagaaatgaaccagaaataactgcaaacgaagtggttaggaagaggggcaggacatggggagtatccttgaaagggacttaatttcatccaaggaaataggttcccagtttaagcccagttagctctgtattcagagtggatcttctcagtgctaggtgaaggaagggtggttgtgcatcagagtaagtgtccagccccaccctgaagactcccattcaggtggtctgggatggggcactggtggtctgacactctcttttgttcaaaatcaaagcgtccccctccttctcatggaagggaagcttccaccaacccttaatgagttcctgtaccatatggagttgtcaaatgctccataccgggcacagcggctcacacctgcaatcccagcactttgggaggccgaggcgggaggatccattgagcccaggagttcaagaccagcctaggcaacatagcaagaccctgtctctacaacaacaacaaaaaaattagccaggggtgggggtccacacctgcagtcccagttacttgtgaggctgaggtgggaggatcgcttgagccaggaaggtcgaggctacagtgagccgtgatcatgccactgccctccagcctgggcaacagagtgagactctttcaaaaaacaaaaacaaaaaactctgtcctaagtatcagatgatgcggaagcccagtacttggttttactaggcttagcaagcagtcgcttatggaacagaagcttttataaacaaaccatgtagttaggaagggcagtggcagcccaggcaaaatctagtcatttgaattagccaaggaacggagacaaagacaaagtgaatttctggtgctagttgcaacttggtctcgataataaatcaggaacacaatccccacattcctaatgccttgctccaaaactcagcaatcctcctatttgtaagaatgaaaaaattcaggagggaaccaattgcctaaggttatgacagcaaagctaccgttccagtataatattcagccactagaggacacaattcactcactttctagattcagacacacgactacctttttcgttacaaaacatatgaagtcgtgatttatgaaagtaggacacatattgtattttttgcccttgaagtgcaagaccaggaaaaactgaaaagtattgcagcatcctccgagatcactgttgtcattttttcgcaaaggattttattctagcctgtcagtttctgcctcctttcattagtaagtcctgaccttagacatctggcatttttttggaaggtgtagtggggagggggaccaagagatgcatcccttaatgtagctaaagatcgaaatcttctcattttggggagagttgcttactatacatatttacacattcaccaattttgtctcatatgtaaaccacagaatgtgccgaattttcctagaatcatggttgaggcaggtaggagtaaggaggtgctgtgtacattagtgtcactgattccaccgttcacaactccataccactctccttattttatactcttgagtccacagtgctttggtgttacagcccatatagaacggtcctacctaaaagtcctgcggtcggtttaacagtgacgagtgtcatttttccactgtcctttacatagaattcagcaggaagcttcatgaggcaccctgtttctacatgagttgccctggttggtggaggcagaagcaatggagaagtggtgatgaaattaagtcaaagttaggcttgcatttgactctgatcttgaatagtttgtctagattagagggagcacctaaaatccaaaaagccttttgtctttgatttctatacttttgttagttttacaaattattatttaaaatcagtcctttgaagtggcttcttctcttctgacgggacagctttgggaaactgtttagtcttatttcttttgctattgggaagttgtgggggacgctattttgcagctttttcatcctcagttctgacctcctcatgtgctttacagatgcccccaaaggtcagcattcatccacctttcactgagagtgtttggccatctctaaagcagaggtattttaacagctctccttaatggatgtcctgtggtttcaggcctcagacaggctgcccttgggccctcagcagaagtcgggaatcgtcttatacttccagatcgtcttttactcaggcaaaatatgagatgctgtgtcagggtttcccaagggaagaaactgagtgggaggtgcaggtaaaccccacagtacaaaataaaacagagctgtgagtagttgaaaggactgtgttttgacagcgtaataaggtaattgtttaaaaccatggctaattcatcagatgtcatgtgtcttttatagttaaaagatgaaatttctttacccactggtgtcaacaacagaaagattctaaaactttcaaaaaatgtgccagtcctggctgctttgtttcatgttctttgacaactttcaaaatgtaaattgagattcatgcaactattaatggaaatataaatatcatggcttcataaggataaaattagaggagctcaacataacggctcattttaatgatttctaaggggtttccatgcccaggctaataactgtacatttagcaataagcaaatctcaaagcctatttcttatctttccctagaattacagcttttaagcccaagctggtcgttccttttataccactccactcacttgataggggtgacatgggctgagctttctctcctatcagggctcaaagacaagtttagcagcgtttctaaacttctgtcaatcagctcacaggacacagaccagtttcgttatcccattaacagatttacatttctgttctctggaagtgtcagttaatgtccttaaaggtaatatacacaaatgtacacaatagtctctgaatttttctcagaagacacactcagaaaccttagaattctgattcattctctttggctcagacttggatgaatttgcttctcagagtagggacatgaaaattattcttaatttatacttcatgtaatctgtttcttctttctccctccgccgccctccaatagctcttctgagcttgtttgttcttcccctaactcccattgttgaaaacatggcctcccctcattctcacctttccaggaatctccttgtgctcctcaagttcggctcatcgcaaacttggagttctgttttctcatgcccttctttcattttcttcttttaagagacaggatcttgctctgtctccaagattggagtgcagtggtacgattctagctcactgcagcctcaaactgctgggcttaagtgatcctcccaactcagcctcccaagaagctaggaccactgctgtgtgtcaccacaccagctaattattttatcttttctagagacaaggtctcactctgttgcccaggctggtcttgaactcctagcctcaagcaatcttcctacctcagcttcccaaagcactgggaggtgccactcttcttgtgttttttacctttgcatttatttcctggttacaatacttttaacttaatggctgctgaactagattctgccaatgtacgtgccgtccaggacacgttcatgccactttaattttcttagaacatcaatgagatagtcttactagggagagataaagggcaggggtttggttttctggcaggttttctttcattttaataacgagccaacccacggaggaaggaattgattgatggctgcttcctcttttgtaaagaacaaacatcaaattagtggtttgtcctcactttgcggataagcagaataataacacctgtgcctctccctgcattattttgaaactaatataattttgtttggacagaacgtagatagcaaccttaatggggaggaatgtggaagaggaattactgaagggggaccagtcagcctgtcaggcagcaactctggtgccaaagaatggacataggatcagagctgtggacccccgtcctgtttgtaaacttcctgagggtggcagagattcataccctttctcccatcaggacaaaaatcagtgtgttggagctcactcaggaaatgctctttgggattggcatgggaaggggatgaggccgattgacaattagcctagttcactgggattttgttgtaggagctgggtggtggcaccatatggccaacaggggatgccagcgacatccctaatttctctggcttcctgataggtcctggtagggtcggggttccaccgggatttgcctagtatggtctacctctgactgaaattaaactctaagtaggtaactggggaacgcctttctccagagagaaggttttgatgtgatctcatcatcggggactggattggacctggagaaatcagtttttctatagtcttgtttctagagtggcaccctggtcttgggcaggtcagaaggacagatagttggtcaccatcttcaacacaaatcatggctggaaaagggccccagtagggagtgcctttctcactcaccaatcaccaaggctagaagatagtctgcagattctttcagatgccacaaagctgtgattacagctgcccattggcaaatcaggtactagtttttgttaatcacattgcagtcttccttcactgtttcttcccctggtcccggaattaaggctgggctccatttgacaagttatcttctgtgcaggtagagcagcaggctgtgttagctcacagcatctactcagtaggcatggaaatatccactgaatgggactgagaaagtggaatgggaggggaacgtgtgaagaacaggaagtttgcctctttatgtccaaagtctgtctacttagagcaacaggatggtgatgatgctttctggttaaagatgtcatggcaacagtcttccctagacagctctctagcaatagccagtggcatgtaaaccctgcatttttgcactgtatccagtgtttgcaactcccttgtagaactttccctgaagtcagcaagaaccctgtgagaatcaggatttgtctagaaatttagcatttacctaatcaatgattctctagacatgtcagtacctccaagtgattcatatgcatgtttggtgggcgtcgagcatgtggcagtttggagaaggaagtggagaatgcagcagcagcaggagaaatgtttgatgttgctaaacatcaaccccacagcaagcctagaactcggggaatgggaggcatggtgcgggtagctgctgacacacagctctagagatagctgcctgcaaagctggatgggactccaggcaataggcttcagggcctaactgctctttcaaggtcactgattgttacaggagccatggtctgcagcattgagcatggaattattattactattaagcatgatcctcaccgtgatgctcttggggtggaacaaaagagcccagagagaatatgcttattttatgcaacctctaacgtttcctcccagagttgtgatgaaactgaaccaaactctagcatgagaatcggcatcccaggccagcagccaaaacaagtggtgacacttggccaggcacggtggctcatgcctgtaatccctgcactttgggaggccgaggcgggtggatcacaaggtcaggagtttgaaaccagcctggccaacatagtgaaaccccatctctactaaaaatacaaaaaattagctgggcgtggtggcgggcacctgtaatcccagctacttgggaggctggggcaggagaatcgcttgaacttggaggtggaggttgcagtgagccaagatcgcgccactgcactccagtccagtgacagtgtgagactctgtctcaaaaaaaaagtgccgatactttatatatcttctgaaagaaatgaagtctgtaagaaggactgttaaccctcagaatggtctggggatgctacatccccttgtggacttgtcacactggtatgagtgtagggagtgggaacacttcttctcagctccttcctcaccatgtgtcattcagggacaaagggagcaggatatcttccctttgaaaaatctcatatgcctggcaatactcgtcaccctgtgaataatgttgatgcattcacctaaccagtattataagcccctgctgtgtgtcagacactatgcttggtgctgaaatagacaaggaggggactgcctgtcttggaaggcaaatcccagtctcctaagagacactagaaccacaggcaaccatgctgatctatgcaatgacatgtaatgcaactttgtcctgcaaccaccttgagatctttgaaagttctcctacctccaaaactcagacaagtcctctctcttgccaagtgcctaaagcaaggatatgtttatagaggcagctgggggcatctggccaatttatttcccagcagacctgctgcttcccctgattccaatactttcttccccaacccaaaccaaggcgtctggcaatgttaaaaacatcaagaatgataaaacaagcattttaatgaagattattgatgtattcattggctgtttctttaaatgggtagagaactaataaaggatctaccccaaataaccaaaaatatcagcctcagcaccagcagaaattggaagcgttctggtatttatatgtgtttttctcagctggcagatttgttttaggaaactatttgcaaagcctgggaaaaatgtgctttctctgtctgttaaaggaacatgcaggttggttggtgctggttctccatctgacagttctgtctggtggcctcaaaaaaaaagaaaaatacagcatagtccagatttggactatgcaaatggtgtcttgaaacttaacttttaggtcttgagcaaagccaagtattattgaaatgtttattttgtttttatctgcaggaggttttcattcaaaatgtggtgctttgggggaaaaggaagggtgtttgtactaggtactttttagcattcttcttattatctgacctatcacagcctcttcaggagacattaattaatttagttcatataatcaacactggaaccaaggaaaaattatttatacttttagaaattctcatgttcttatacttctttggagattgaattgactccaaagagactattttgtgattaagaatatttttgtggccgggcacggtggctcacgcctgtaatcccagcactttgggaggccaaggcaggtggatcacctgaggccaggagttcaagactagtctggacaacttggcaaaaccctgtctttactaaaaatactaaacttagccagccgtggtgacgggcgcctgtagtcccagctactcgggaggctgaggcaggagaatcacttgaacccgagaggtggaggttgcagtgggccgagatcacagcattccactccagcctgggaagaatatttttgtgtggggagtcgttatattatgtccttagaccaggaggtccaattgaggcagaaatttttgaagtaaaaccattttttttgaaggaaacacatatttaaatatcaaagaacactggacgtatacttttaaaaatttacatacttgtgttagttatctattgctgtataacaaaacctttgcagctcaaaacaacagtcattatctcacaagtttatgtaggttacgcaggtgcagctgacctgcttggtctgagctttcgaaaagtgcagtgaggatgtcagcctaggctgccgtcacctcaagggtcccctgggggtggatccacttccaagctcactcatgtggctgttggcaggatgcagttgctcacgggttgttaggctgagggcgtcggttcctcactaagccagaggcttccttaagttccttaacatgttttctcatggggggcagctcacagtgtagcaattggcttcgtcaaaacaagcaagcgggagggtaagagacagaaagcaagacagaggccagggtctttcacagcctaatctcaagagcagtacctcatcacttttgtcctattttgacaaacgtcgtattgacttttgtcactacatcagaagcgagtcactaggtctagcccacactcaaagggagaggatttcacagagcaagaatatcaggaagcagaatcattggttatttcattagaagctgctggcacagttcttaatgaagctacaaaacattgaactgggaggaatatgggggtaggagggtgacagggagggcaggttaattttgtggatgctgaggacaacgtgcctcatgaaaagtgttcccatcagactggtgtatttctgtttcttttcttttttttttttttttttttttttttttttgagacagagtctcgctctgtcaccaggctggagtgcagtggcacaatctcagctcactgcaacctccgccttcctggtacaagcgattcccctgccttagcctcctgaatagctgggattacaggcatgtgccaccacgcccagcttattttttgtattttagtagagactgggtttcaccttgttggccaggatggtctcagtctcctgaccctgtgatctacccaccttggcctcccaaagtgctgggattacaggcatgagccaccgtgcccagcccagaatggtgtatttctaggacatctgcaatgcatcactctctaataaaagaaaaaaaaatagccactccttgacagatactcaaaggtgtggagtcccttactaaaccacactccaaagaaataagcctgcaaaatagggaaaagttgttttttacctagaaagcagattctctgcattttcttattttcaaatagtggggagaaaccctaagctgtacatatgaaggaatggattcatttctcctcttgcacagcaccccagcaccttgtacaccctattcctccctaactcccaaccgcacactcacctcccaagcatctgcagatctacatacatattatcaaatgtacagagtactgagtgaaatggtcactgtagctatggaaaggtgagatttgcaggctgtctgaaatgtttcttgctaaagtagttccaatccttcccccatttagaaaaaaatacattcttagtaaatgactttcaggcagaaaaagaaaaccacactggaaataggattctaataaaccaacatggggctctagctggtgaacatatttctgagccatccctatacagaaaccacaagacaaataagaaaaagtaaatccagatcacttagacccttcaaaccacatcctgggttccaaggacagtggctgcgagttaggaaagatacatttatccagtggaccttttgactgtcttgtcaatcttaagaaaaaaatgtagagtaaaaaattttggctgggcgtggtggctcacgcctgtaatcccagcactttgggagaccgaggcgggcggatcacgaggtcaggagattgagaccatcctggctaacacagtgaaaccccgtctctactaaaaatacaaaaaaaactagccaggcgtggtagcaggcgcctgtaatcccagctactccggaggctgaggcaggagaatagcgtgaacccaggaggcagagcttgcagcgaggcgagattgcaccactgcactccagcctgggctacagagcgagactctgtctcaaaaaaaaaaaaaaaagaaaaaatttggtttgggtcccttcccaccttcccttgcttcatcactttccttaagcctctaagcatccagatcttccccaaagcagtgcttcctagtcagtgattaccctatcctctttttattccttttcttcatgcacaccttcagtccataaatccaagctttttgtaaggagggagggtgagtaaaccaattcatactaaggtgagagtgaattatatataaacctcttaatatattaaatctaccaagcagtgtttcagaaggaaatctgctaacatgggcatcttacttgaaaaaaatttcagttggttcaacaaagtatggtttagaaatcattttcaatcaggatcggggagagaatttttttttttcttaaagcagttaggtttccccagcagatttcgaatgcttggatatttgtgattcttttctatgggaatctgatctggataagacctaagaccataaacactctagctttccctttgggtctttgctattgaaaactagttggacttaaacaagtgaagtgggttttaaggatggctcctttcacccatttctaaaagatagcattcttgagggtctgctttatttagcagaaggaatgctggttttccaatctctcactcaaaaggaacttttacttatctcatagaaaagaatgggatggagattaatgtaatagaaaaggtattctacaaatatcatagcagctatatttaatcaattcatgttcaaagatcaattagtagtaataagagttgtgctgtataaaatcaccatatctcatattcaaattgcagatcatcagttgaaaaagcatggattgttttctcactgaaagaaatctttaaaagtggtaccataagagacattaagactggctattgttttatttctctctctctctctttctctttctctctttctgtcatttgatttctgactttcagtggatttttttaacattacaaaatcatagagaaagaatattggaccatttattgtagagtttttaaacaatttgataccattttttttttctggcgtcttaactgcatttgctgtttgtgaggggtgtagaggtccctgatgttcagagtacagtaccagcgtttatgtgaaatattgcagcctggcctgtggaggacaggggttactaaggggcaagctgctgcttgcgataacacccccagtgcctccttctaatcttgcgccatttcccagggcagacagccttgtggggctctgactggtgccctggaacatgttttaccttccatttttcttgctctgatttctgaagacagaatgttctcttcaacctacacatcaggagttttccttctgttttcctttttcactggttcctttgtgaatttgcacttttatctaacctaaaacattggaaacaggaataaacacaaataatggcatgaggccgtggccacagaatgacaagacaggacacagcaaatgttttgggtttttttcacatttatgaaccttctcattctatttatttatttatttacttacttatttcttgagacagggtctcattctgtcacccaggctggagtgcagtggcatgatcatagctcactgcagccttgaactcctggactcaagtgatcttccagcctcagccttctgagtagctgggattacaggcatacaccaccatgcctggctaataaaaaaaaaattctgttgtacagatggggtctcactatgttccccaggctaggctagtctcgaactcctggcctcaaacagtcctcctgccttgacctcccaaagtgctgggattataggcctgagccactgtgctcaactgcttcccattctaaaaagtgtctaaggcagttatagaggttatataacaaggtataaaatttctgagtgaaaggaaaataaggagagagaaataaatctaagtgtgtgtaaggttaatatgtacacagaatgtttattaaggcctttgacagttcctttaaaaattacctgcaggccaggtgcggtggctcatgcctgtaatcccaacagtttgggaggccgaggtgggcggatcacttgaggtcaggagttcaagacaaacctggccaacatggtgaaaccctgtctctactaaaaatacaaaaattagccaggtgtggtggcatgtgcctgtagtcccagctacttgggaggctgaggcaggagaatcgcttgagcccagaaagtggaggttgcagtgaactgagatcacgccattgcactccagcctgggtgacagagggagactccatctcaaagagaaacaaacaacaacaacaacaaaacctgcaaatttgagctgcctagcagccaagcaataaagggaatcacaatgaacgataagattcatatatctgccaatttaaaaacaaaccagttctcttgggtcagtgcttctcaaacttgaatgtacatttgagacacctggtgcattgttaaaatgtaggttctcatctagcaggtccatggtgcatttctaactggctcccaggcaatgctatgctgatgctgatgctgacgctgacgttgatgctgctactcattggactgccctttgagtagtaaaattttagctcactcagaaaaacctcatagtttatttggagtaacatccctttagcccttgtagatattataagactacattacaataaagttctggtgagtctaattgttgaccagagagattgtttacttcagagcacctggatttgaattgcagtgtgccacctgctgctgtgttacctggtacaagttaatgcattctcttcacacctcagttttatcatcttctgaatgaggctaatagtagtacctgtcatagatgcttgtaacagtgcctgcatagagtaagaatgaaataatgttagctattttttattgttacatttaaaatagattttgctggtagtgaaatatgaatgataaaatcatctcctcagctgttttccttgcataagtaccttaaaataatgtatttgcaatttccttctgaatccttgaataaaagacaccagataatcagaagatgttactgacattagtaggcatttgaagttcactctgatgggatcagtctatttacaacaaattgctatagagagtaaaaagcgccaaccttttcctgtagtttttgaatgacagcatctttgttcatgcagttggctttgctgcatttccacttcatcaattttttggctctgtctttgcaaaaaaaaaaaaaaaaaaaaattacagagggagaattttaaaacacaaatgaagaaaaagaaattactttgaaattgccaaaattgtttggctgaaagagcttatttagaaaaacagagctttttatgtataaacctgtttcattggtgttgtatcagaattgcatgttgctagtagtttactatcaaaacaacacttgtgtttcaagctgttaaaaaatgaataaaataggccaagtatggtggctcacacctgtaatcccaacattttgggaggccgaggcgggcggatcacttgaggtcaggagttcgacaccagcctggccaacatggtgaaaccccatctctactaaaaatacaaaaattagccgggcctggtagcatgctcctgtagtcccagctactcaggaggccgaggcaggagaattgcttgatcttgggcagtggaggttgcagttagctgagatcatgccactgcactccagcctgggcaacagagcaagactccatctcaaaatttaaaaaaaaaaaaaaagaataaaatagaaacactgatttttctggtattttatacccttccccgaatatccatacccaaggcatttttaagatttccctaagctggaagcaccagaccacatgttatttaaaacatattaagatgtacctactgtattatgtatactttgtatatcattttataacagtctgcaaagtagcaggaaaaaatttttgccttcaggttaaactcagaagagttgccattggctaactgaaaaattttgcatttggtaagcatttaattaaaaatttattgatttcggttttgaggttttacttttcatatttttagagccaataacttctggaatctcagacatttttgtggaatcttaagttgttcatagatcctaggtgctgtgtttgtcatcctgagagcttaaatggccctgtccaaacctcagcctcagctcagagtaggaaattgtcaagcacttggtaactggtaagcaaatggattttagtcactaaatggagcgggaggaatggagtgctccctcaaaaagagcatttcagctggtcacagtggcttgggcttgtaatcctagcactttaggaggcccaggcatgaggaccacttgagcccaggagttcgagaccagcctgggtaacacaggaagatttcacctctacaaaaagtaaaactaaaaaattagccaggcattgtggtgccttgaatctgtagtcctagaaacttaggaggctgaagcagaggatcgcttgagcccagaaagttgaggctgcagtaagctgtgatcacgccacagcactccagcccaagcaacagagcatagactccatctccaaaaaaagaggctgtgacagaggaaggcagggggatgttaatcagagagacatagagactgggagagtctgaaagagaggcagagagacttacacaaattaaagacacagactgagagaaatggaaaaatgaagagaggatcccagacagattgattgacttcccaggtaacatataatatcttacaatcctgcagaatgtttaaagttgcattttaaaaggcactccgtttgttcacacaatcctggtaagaagatcatcttaattagtatcatactttgcagctttcaagcagttcttaggcatcattgcgtttaagacctggctccagccgttttattacagatgaggagattgacttgttcaccttacatttgtagagcattttgcaatttttttgaaggacatttccacccattatctaatcacaagtctccataaatcccatctcccctggtataaaagcagcttaaattacaggtgctactaagatgcaaaatgcagcccacaaaatcagcaaatattttttctttgtttcctccttttttaaaaaaggcgtagatttcatattactactttgtttcaggccgtatattgaagtaacaaaaataaaaccaaaattgacaccaattttatttcgaaataaaatctacttttttcactttcccacatcattttctagctgctaaccttcatgcatattcaatttttgcatatttacagccctgtcaaagataaaattttattttctgcattttcactcaacattatacactgagtattggccatttcactcatctcagtgccactttcaaagagatacccaggaaaagcagcagcaagggttgttcgaccttgaacaactacagataatactttggctctctttgagatttttaaggccctgtaagtaaaatattttcagattacagaaggcttgggattctgtctttatcacatgactgattggtcctccatgttctccttggcagatgtgggtatcagtgacacaatgttttttactcaaaacatggtttagcttaccagtaccaggaatggccgatgcatacgcattctcattgtgaaggtttatttgcacctccactcttcttaaccaggctattttcacagaagaaataaccccaacttcatgaaccctattcccatgacctatttgccaatctgttaaaataatggccaactcaaatgatcagtaatgattgactcaccatgacatcatccatcacctttgtcactggaagcccacttgccttaaagggtgcagcatcttccaactttgctccagcaacttcagctcctcattaaatccctccctgtaggtcatccctgcaaccagttgacactggagctcagcagccagctgataggggccttcactcctcttgtcgagctgctcctctctcctctcaaagccctctttccttctctcctgctggctgacctagaagctcagctaaagaggtgttcaaagggtccagtcgcttaaacaggtggccagtgtgctttctgctataactccttgctccttgagctcagctccaagctgtagaaggccatggaagagcacattgatgtcatcttgggaataattaacagggtccggtttttctgttcgtttccttgcaccagatgaagagtaggataaacttgggagaagccaaagtgatgtttttgtattgtggctttgaatgatttcaaggtcccttggttaacctattctcagcaaaagaaatagaagatggtcccaagatggtaagagcagagtgtttggttgataatttgatctaaaagtgaccagactccacaagttaacccccagagctgctcaattacagcagtttaaaaataagttgaggattcgttgctaaatcagtggaaagaatttggagtttccaaaatagtttgtaatcaagaaaagccatctgaggaggccctggagggaaaatcgctgatgattatcaaatgtccagttctcaatgcggtggtatatgtgactgaaaaaaaccacttttgtccacatttggggaaagataagattatactaaatgcctggcacatacactggaccttcagttacctagaaaactttcaaaataactttgccataacaagtggcaaattattaaggtcatgggctgtcttctcaaaattacttagataacatgattctctggccagtatgagacccttaatttatcacgtatgaagcatatgagcctgtttatccgttcgttaatcattatttttatctggcttgggctctgggttactggccatgcaggcagatcttcccttccaaaaggaaacgttattattctcttgtattcgtttctttaaaaacatgcagatttaacaaaacatattacttagcactcttactgatttagaaatatgatgacccttaggaaatgcatctccttaaaagaaattccaggcaaactcatttaacctttctggatgttagtttcctgaccttcaaaaaatgggatgttggaccaaattatcttgaagtttccttccagctgtgtgctcggtggggagtgctggcagtgtggggcaggacactgaatatctgtggtggtgatgtttggatacaggggtgagcaacccctttggaagcaacatgcaaaattgctgagcagtggtgggggtgcatgggaatgggtggcggtgcccctgtattggagtgtaagagacaagtgtggtgagagcagtctggcagggctactactgttatgatttacacagtccctttcatccagctacttcaaagcaccttcacaaactctggctcattattccttcaaacacagcattcaagaaagattgataggcgccttttaattaattcaaagatgatgaagctgagcattacagaatataaggggattcttccaaaagtatctgcactgcagaggggcatgatatataaagtgttcatcacaggtttctaactgaaacaaggaaatgacctgaacgcttatttttagaggagaccagtatatattatggcatattcagaatatgcaataccatgcacccattaaaatcatgtttattaagaatagtcacattagggaaatggtcataactgaacaacgtttagtggcataaaaaaagataaagctttgtacatacagtatgatgaaaatgtttaatgtggctgggcatagtgacttgtgcctgtaattccagcactgtgggaggccaaggcaggagtatcactgaaggccaggagttcaagaccagcctgggcaccatggtgagaccctgtctctacaaaaaatttaaaaattagccaggtggtcatgatgcatgcctactattctagctactagggaggctgaggctggaggatcactggagcccaggaggtcaaggctgcagtatgccatgatcataccactgtactccagcctgggcaacagagtgagatcctgtctcaaaaattgaaaaaaaaaaaaaaaaaaggtttaatgtgtagaagggaaaaggctaaatggaaatgtgttaaagtcttaacggtgatcttccttggagcaatgatatagtgggtggttgctattcttttctttatacttttatgtacttttatgttatgcaaggttgaaaaaatgggcacatattgctttcatagtcatttctgttaagataatcatatgattatgaaagagggagtgtgtgtgtgaaagtggaatggaccaatcaaatagaacagtaggaagacctcagaagatatgacacatgagctcaaccccaaagatgagaagaaccagccatttagtgaatggggaagccctctggggaacagaaggcacgaaggaaggaataagtttggaatgttctaggttttgaaaaaaggccagcatgggagaatgatgaaagataaggtcagagccattgccaagggcaaggtcatgtaggacccatgacgaaaagtttgggaaacccttgtaggggactgacataatttattttacatttttgaaaaatccttctgaccaatatatgaggaacattgtaagaggcaagtgtagaagtcaagatctattgagaaggcgttgcaggggtccaggtgagaatgaggatggttcagagtggagagacagggacaaggtaagttggagtgtgggtctgacttgttagccatgtggaggaaataattatcataataactatcatgtatgtttttagggggctctataacttcagtatgttttcagtgttcacatttgtaggtttacagagtttgtacttgataaggtacagaagtaagtcacttctcaaaaatcatgcctttagaagcatatatcatgcttctattatagtaatgataataatagaagtctactgctagtcataaaacttatctgttcagagaaggctttttttttttttcagagaagtcttccaggtttcagctgttgctcattaatgctcaccacagccctttgaggtcgatgcaattatgctttggaaaagctaagtaacttgccaaaggccatgcagctaaaagaagcaaaagctggattcaaatctcagctctctgcctccagagagaacaccctcaatcccgcttaacagacattagctctgcttatttgattggtggcagtggagatgaacagaagtgaacagtgagcagagaggggtctgtaccccacacacatccctgcaccccaactgtcaactgtcttccatcatcatttactatatccacgtccactcctgacagcatcagtggctcagtcttaccgacctgcatcagggttttgggctctgcctctgtttagacagagcacgatttgggaagtgctgctaagtcagccagtggctgagtagaaacagccctgcagtgggcctctgcctgctctgtggctcgtttatcatgtgtctcatctttaaaagttggggctcagtctaggtgcctcctggcctgagcaccccagaattctatgctgatcccttcattgtgacatggcctgtcatctactcttctgggaagaccatctgcacctcactgatacttgaagctcattgagtattgtcacatatcagcccagaaagtcacagggtacagcaactcatacttgctcccagcaccaggccagccccattctgcctccagggagtcacccaaaatagagagatgagggtaaaataagacctaggaatactatttatttgcctccatggcctttgaacttgcacatccaacgtaacggctcctgtgtgttcttgattgttccaattatcatttttcctctcgaatacctgagagcattcattattttgcaagagatttgagaatccctgtgccctaacttttctttccttgatgtgggatgttcttctgtgactaggtaagtttatctcaatgtgtccccaaataatttctcagaatgttaaattcataaaagctaccatgaaaggataaataaatgaaaggagttctgaggtcaaaacatttggggaaagaagagtctttctccttctgaggcattctcagtgcacagtaacctgtttatctcgctttgccttgctctttcccaagcacatttttgctcaacgccccctaccttccccatacacttgttaacactttgcagagcactagggctctgtgggacaggctgggaaatgcaggttgacatgccactgttaatacctagaaaattaaggcaaacttgtccctgagagatgtcaggatagcacagtatggaaaggccatgcttatcagggctcttatctgagagaatacagtggttatgagcatgactctggaactagacagtctgggttgaattccccgctctgccatttagttatatgatatggggtgtattacctaacatctctgtatctcatttgttcctcacttgtgacatggggatgatgacaatgataatagtaccaacctataggatagctatgagaattaaacaaattagtaaatatgaagtatttggaacattggcctgactcaggataagtcctgtttaaatgttagtatcattattattgtttcttcaagccaggaatatacttcatcaattatgtgtacactcattccttcattcaacaaacacttacttaatactcctgtgtcctaggcactgttctagtgctggagatacatcagtgaatcaaaaacatgagagaaaaatccctgtccttgtggaacttacactgtagtggaatctactactaataatgcaaatagaaagaaaaatatatgcaagttacccaggcactgggtagcctagtacctgtcctatagttgtcaaatggatggatatattattcttattgttgttgtcgtttacagtaattgagcttggaggtttgagctgccatcttagataagaacagaaagctaagccaatacgagtgccatgccagtaagaaaaggaaactattacataaagattaggaagaaaaaagagaagaatgacaagtaggccattatctatggccatgagttttatttaaaatgagctggaccttttttgccttctttatctgtgtatcagatagacaattacctctaggcagatttccacattccaagacatgaagactttctaagctgcagcagacacatctttacttgtagcaaaacagagagcgatgggggttattttcagatgactgtagctgaagaggaagaatcaagtaattcactccccccaataataattcacttctgagaggaaaaacttctttggaaaaagcaccccatgaatggaagtctcagcatttgctgaagaacttagttaaaataaactctagacctttttcattgattctttatctcttcttttccagaaaccttctctatgtctacccacagaggctgaactttgtaaacaaactagcatcagcccggaacattacaataaagatccagtttatgtgtggagaagatgctagcaatgcgatgccggtaaggagggaaacgaacatttgcctcaaatcagggtgggctgctcacccctgtcacttcacacaagtccgggactcatcagtgtacaaagtccgtctattccaggccaatactgctcagcatgtgcaagggcttctgtgcccaggatatcagtggggaaacagggtcagtcttacttgacgatctctttctcggcttattctgtagtgagcttggaacatacagatcattttagaggattaaaaaaagtcataaagtctttccatactgcccataggaccaccccactctaaaggcatacaaagtaaagagatggctcaacacgtgcgccatgtttgctgagtgtcttccatgcacaaactgtacacactgtgttatacacacacagtgttacacacttactcaagcctcggaccacagtgctgatgaatacaaagtaccgcctagtaattataaacacacaccacctccacaccttctaggagtggatctttgttctgaggcaaaatataaatcaaattattcatatatatatatatatataaaatgcagtgtgctccaaggaactcaaaatgccagaatttatactttttaaaccatctcctactaaatgagatggtggttagctattactatttcccataagtcatagaattcagttaatataactttctttctttttttcttttttttttttttttttgagacagagtttcactctttttgcccaggctggagtacaatggccgcaacctccacctcccaagttcaagtgattctcctgcctcagccttccaagtagctgggattacaggcgcgtgccaccacgcccagctaattttgtatttttagtagagatggggtttcaccatgttggccagggtggtctcaaactcctgacctcagctgatccacccgccttggcctcctaaagtgctgggactaaaggcgtgagccactgcacgcagttaatatacctttctaaaaagaaaaagaaaaaaatcctttctcttaatgtcccacccaaagaaaaaaagaaaaaaaaaaacctttctcctaacgtcccacctgtcttcccaatgcaaggtgtcttaagacagcggtggggtcctcttagtcctctctgctcaggcccctggcatgccactgccaggagtgccagatatgcttgtgcagatcctgtggcaaccaagatgcccagccaagagtgactgtgggctaaagtccagtctgttcttcattcactgagccatgggttctggtgttgggattactgcatctagaggaaagagctttttttctctgcacaaaggtgagtgcacttgttcataatgcatcctaaatgctgcttcaggcccaaggaggtatctttttctaaatggcacaaatgtggataaggcagtggagattcaaatcacctaagtgagtaggtctgtatgtttgagagagaagaacctggaactggggatttctcactcaagacaaaagtatgtaactttggcctgttggatagacctctaggcagtgaggcagagtggagagagtactggttttctaatctcacaaacatgtggcctttggtcactaatatagccccttggaacctcatttcacccttcatagccagttcctttgcactggtgtgcttgggccagttgtagtcccagcacttttttttttctttttgagacaggatctcactcttgcccaggctggggtgcaatggtgcaatctcgactcactgcaacctctgcttcctaggctcaagcgatcctcttgcctccgccccctgagtagcagggactatacgcatgtgccaccacgcctggctaatttttgtatttttttgtagagatgaggtttcgccatgttgcccaggctggtctccaactcctgggctcaagccattctcccacgccgacctcccagagtgctgagattacaggtgtgagccactgctcctggccaacccagcactcttaattgtacaaaatgcagctctatgagaccagaacatcctgttggcctgatgatagtcaatttgatgtacccaaatgttactgataatttgatcctttctctactggtgaacaggtcatctttggaaaatccagcgggcctgaatttctgcaggaagtgtacacagctgttacataccataataagtaagtctatttcagcattctaaatatatgccaagatggtttcatcatctcctggtttttccaagtcccgtgggtggttcctcctaactatttttataattcagggactgaggggcaaaggaaatccatgccagttccgtgactctgtgttgaagatgtataactttgccattaaccaagactgagagaagaacgtgtcttcaagaatccaatatagttttgacttttccagaagcttctattctagtatgatgcaaagaggttgtattacgttaattaaggaaacacatttcctaacttgctttgagaccctggaggggaccagaagcacagtccggctccccttgccctgtgtgtccctgtccgctccacttgacacctgccccactgtctgcctaggctgaccaaaggagaaatggaacactcattattccaccggcaaatggagtcatgggataatgcccaccctattattcatgttccacagggaagggagagacacctgcacagtgttggacggaattgggtttgatccgggcctgataacctgggcctaattaagtccttcatttaagcacattctgggattgggatgaggattaagtgaggtaatgtacattacatacctacattactttacaatgtacgtaatgtacttcgtaattaatgaagaacctagggcttcataatgcagttaaattggttcctttttcctcctgcctcattcatttgcttctactctttgatgagtgcagctaggtgctaggcttggttccttgggtagaaatggaaaaaggaggtcacagcaggagtccaaacctcatcctttcttcaaattaagttgttggagttttccattgtgtgggggagttgttttttgttttttgttttttgttttttgtttttcctgacaaagcctttagttcatgaacagttttatgtaagggaagtgcatctaataacataagcttggtctcagggacttccagcttcagagcagagtaatgtaaaatgaaaagcaaaacaccaggcaaattctgaggagcaaaggggctgtggcgttttacaatcagagaagtcatcattcttgctaaaagttatttgtgtataatgtgcttttgaaacaggtctcctgacttttatgaagaagtgaaaattaagctccccgctaagctcacagtaaatcaccacctcctgttcaccttctaccatatcagctgtcagcagaagcaaggagcctccgtggaaactctcctgggatattcagtgagttgtttccagcctgctgactcacactgcagttgttggtgcatctgaggtccctgcagagataaacaaccaaattctattcacttgattttttccagtcagaagtagcaaaacatgctaagccacattatagcaagaggcagaaatgatttgccttagcaaatgtcaaatttcaggaatggaaagctagcgggtgatagatgttggaagaatactcatctgttttttaaaaagcattgcagtgttcactatttccaaatttaatatccatgcttcacgtatagaactagctttgtcccccaagaagaaaccattttttctttaaaagatataaaaggtgaaataaacattgatgttgttcagacacacacaaacattggctacagagaaaaatgctactgctttagctccaaaagcaataaatcatcaatattaccatttcaggaggtctcggagatttaaaatgcaaagaactggacagaaattactgccaaaaagagtactggtcaatatctactcactgtttagttgcatttgattattgcgagctagataaattatcagaattatatgctgtaataaataccactttattatttacatcatctgtttcagtggctgccaattctcttaaatgaacgtcttcaaactggatcctactgtctcccagttgccttggaaaaattgccacccaactactccatgcattctgctgaggtaattggcaagctggccatcagctgtttcttgtccagctgtagtcttggaccaccttcccagactcactttccattcccatgtggccatggatgttcatcatgttctcagagagcacattgttctgataggatgggaggaataactgactgtgaaacctcattcttttaaatgccaccaaatcagaatgttcagtagacgcaacctacacccaaggcagcataaccttgcattatctaccacagagggattcccagaataatgtattatagaagaggaggcaaactaaggccattcatagtaaacaactgttcccatcaaggatccttataaaagattcccaggccagattcatccgtttctttcttgggtcagttgtcacagccctccggtagataccaaggtatttattctcctaccaatcccaatgccaatagcctttcccacttcctgtttctggcactttctcttgctcatccactctgctgcagtgcacccatttaaagagaagcccaggtggatcaactgaggtcaggatttcaagaccagcctggccaaggtggcaaaaccccatctctactaaaaatacaaaaattagctgggcctgctgttgggtgcctgtaatcccagcactttgggaggccgaggcaggcagatcacttgaggtgagaagttcaagaccagcctggccaacatggtgaaactccatctctactaaaaatacaaaaaaattagccgggcgtggtggcgggtgcctgtaatcccagctactcgggaggctgaggcaggagaatcgctttaacctgggaagtggaggttgcagtgagctgagatcacaccactgcactgcagcctgggtgacagagtgagactccatctcaaaataaataaataaaaaataaataaagggagcccaggggactgtccaccctgactgcaccagctgtcacactgctagcccacttctcagttccttgcataggtttacatcaataagtattattttgaagtaaatctcggacatcatatttcattttagtctgcatcttaaaagataagggatttgtttttaaccatcacaataccattgtcatactttaaaattttaactgtaatttcttagtatcatcaaatattcagtcactgatcaaatttttaattatcccactaatgctatatttttgacgcttgctttttaaaattggtattcagataaggtccacacactgatattgattgttacatctctggagacgcttttaatctacagatcctccatctcttttgctttccttgcaattttaagttgaagaatttctcagaaatttgaatttaatttcaaccgttccagtcaactttcttctctgttctttcgccatctaccgtctcacttccggctgttttcctcttattttcttttttccttaaagagagaaccaacttttgccctggaccacaggcatgtgtctggtaaaccaaaacttctctcatcaaagccatctaaggggcaatccgagtatgtccacagacatttccctgattggtctttatgatttggacatcaacacctttcagtatccctcaaaaccaccttcttatcatcaagttgcacactctaatttcttagaaccccctattatctttttaagctataggaaagacctgagtgttggagagagacaaatctgtgtccaaagtctagattctgccactccctagctgtgtgaatgttggtgagttgcttaccctctctgagtctcgaagatgaaactgagcccatatctgcatatctgcctataaggttgctgtaagcattaaatgagataatgcttgccaaacaacaaactcaattcctaagtaaacattaattcctttttcttacttgcgctatgctgtgtttatagatatacccttagcctctcttagtatcctttaaacctgcactgtctgataagatagccactagctgtatgtggctattgaggaaaatatggctagttcaaactgagatatgtgctataagtaaaatatgcaacagatttcaaaaacttcatggggaaaaatgtgaaatattgtattaataattttttacattgattacatattgaaacagtctttaggctgtattgagttaaatgaaatattactttcacatggtccttttgtgtttttttttttttttttttttttttagagacagggtcttgctctgtcactcaggctggagtgcagtggcgtgatcacagctcactgtaatcttgaactcataggctcaagcagtcgtctcacctcggcctccttagtagctgggactataggcatgcaccaccacgcccagctaattttttttttttttttcattagaaacagtgtcttgctatgctgctcaggctggtctcaaactcctggcctcatgtgatcctcccactttggactcccaaagtcctgggattataggtgtgagccaccatgcccggcccctttttacttttttaatgtggccactagatgattttaaattacatatatagctcacgttatatttccactggacagtgctattttagatcacagatggcaaactcaagtgcccacaggatccagatgagtaacataaatgaatgccttgttctggtggcatctgttcactctggagattgtctcttccccatctgaaggtcacagctgttctcttcactctgcagattggtgacatgctgggatataaggccaattttttcatttcttccagtactcaaatgaagttagaaaagcagtcttttataggaaattttcaggctttcaaatattggtaattaattttttaaagttcctaatacttcaaacagaacgtgtgtgtaggctagagcccactttgggccccagcttttgactgcttcagatagctttaaaggtctccatcccctgtacacatctacctttcattatgatgaaagacatacaaacctaggcgaggccctcactcaacactgcaggacatctctaaaggaatgcaatttcaatgggaatttaaggcaagaaactgtctgtaagacctacgaaggtaatgatatataaacgtataaaagagtcactttgagtaattaaagcaggagccgacctggcctagaaacatgtgggaaacacttggaaaaactgtggtgaaagggaaagtaatatcgggtactcaaaagtattaaaatttcatgtcttgtaaagatattctatactttgtcctgacaattctgattaatggggaaattgctgggatcttaatttattttaattcctagaatccagaatcatcaatgctggtttggaacttagagacagattacaccgttcagccctcttctcacagcatgagaacagaacactaaggcccagaaagtttagttgagtcgtctaagtaaaaataactagtttgaagcggggcacagtggctcacacctgtaatcccaacattttgggaggctgaagtgggcagatcacttgagcccagaagtttgagaccagcttgggcaacatggtgaaaccacatttctacaaaaaatagaaaaattagttgggtgtggtggtgtgtgcctgtagtccccgctactccagagactgagacgggaggatcatttgagcccaggaggtcgaggctgcagtgaaccgtgattgcaccactgcacttcagcctggcgacagagtgggaccctgtctcaaaaggaatgaataaatacataaatattaactagtttggtgtagaattgaagttgaatccagggctcctgactccaagaacagttagattagttttcaagagagttctgtatttgtataaccctgacatttccagtcaagttggtctgcattgcttgttagtaatcagaaaagggaattggattgctaatcttttttttttctctttaacacagaaagtcccattacagaatcctcccattaagtgggctgaaggacataagggagtatttaatattgaagtgcaagctgtttcttctgtacacacccaggtaaggaatgtcaaggttaatcatgaaggtaaaggtgcagcggaggagcctttgaaggacaggccaataaaagatcagtgaaaatccttgtctacagataaataaaaaataaccctttagttctttgtggggacatgcaaacctctttaggtttcatttgtcattggaatagaaagaccttacaaaaccgccgagcacctaaaggaaagaacctagtatctgcactgttggtggagaaactttgcagggggacttgatttgaaactctcatctgctgttacttcttttccctctgtaactctgccactttgccagcttttaaaaagaaattccgtactctctcctttacctgccactgtctgagttctgcatctgctgagacctctctcttggcagtatgcttacctggtacgctgacctctgcttacagaacatgtcagagccaaaattatttcttctttagctaataattattgaaacgttcaacttcatgcaccacattctacaaagaagttcatagcctcggtctgaaacatcatgtcttagaccttctggtctgaaacgctggataagaggttctacccataaagagctattcgattgtgtttgtgaatccactggtgaacattgatggtataaaaccccatgaggcctgccttctcccttcgcaggacaaccacctggagaagttcttcaccctctgccactccctggagagccaggtgaccttccccatccgcgtgctggatcagaaaatcagcgagatggcgctggagcatgagctgaagctcagcatcatctgcctgaactcctcccgcctggagccgctcgtgctcttcctgcacctggtgctggacaagctcttccagctgtccgtgcagcccatggtcatcgctggccagacaggtatgaacctgcagggctgggctgggaggaggcaggagcaagcaagcattgccttctttaatgaaaaatgactttccagaaatccagagacaatgtgatcttcctttccactgatgatgtgtgctcaagggaggccaagtcttatgctattttttttttgagactctctgcatgttggaaagaaaaagaaacattaaaatagggttcttaatattatagctttttgtaaactttattaaatgattataggcagtctttaaaattccatttctggtaattgatgaatttattttaccttgaagatatttttgttttcttgactaacaggaaatggaacattttaaggtaagacaacctgtgttaaatggagggaaggaactctctacattgaaatgcaatgcaatcaatttttaaagttaaaacataaactcactattttaaagtgtatagttcattggtttttagtatagtcacaaggttgtgcaatgatcgctacaatctagttttataacattttcatcacctccaaataaaaccccatcactccctattcatccctccccctagaactcatccgttctctcttacagtctattttaaatgcttacttttaacaagttaacactaaatacaatgtgtacattttcccttagaaataatctcaaaagcttatcctggaggcatgaccagagtccagtggttctcctaactcttccagggtagactggctggtatagggcatctttatttgccaccattttcagctgtgcctatatagctctttgctttccagtccagcagacgtcttttgggtaccatccatatgcccagtactgtactaaaagttgtaggctttgtgacaataaccaagagcatctcagacctcagaggacttataatatggcaaagagtcagcagcacaggacaagactcctcaaagggacacagctaaattttgcagtggttgtggggagggtggtatcaaaggagagagtgagaaaacatccatctgggaggatgcaggaggtccacataaagagatggccttgaagaagggatagagtgaaaaccgacagaataggggcaatgagatgagtgcagcactgcagagaaccagaaaagtgtgggagtgtcaggaagaaagtcagtagcacagttggtggtggaacagaagcacgtgtggaagtgggctgggacaatgaagtgagacggcttttagagccagggaggggcatgtccccttaatctctcactctgctttgcaccctgatatgcatcttctgtggttccacagatcaaacgtcctgtgttggaggctaacttttcatccatgtagcagttgcctctccagctagattcttgcagagctctgccctccttcgattactttctgtgcccccgcatatgtggcacactgctttgtatgttccagctagttaatacagacttgttcaccagacaaaaatatttatatgttttgagcagcttctccatagcaagttgccaccttgtggtgtgaggaccacagggtgttggcataggcagaataagtggaggtggctagtctacaagcatttattcagaacctattctgtgtctctgcaatggaaagcacagtgggggcacaaaagatgtgagaaatgcacttcgcatgggaaggattccagctttcacagacagacagtttaccaccagacatggctggagaatcatgtaactcagtttcacttgagccctgtactgtgtggagtcagacggcttcatggaggaggtgggacttgtgctgagattcacagggtcggtatgattttgtggatgggagtgaggagggcttcctaggcgaggacaacagcatgagcaaagtctcagaggtaagagagcaggcatgatgggacaatacaatgactgcctcattttaagggatgtcgaactgagccaaaaagggtacaaggttagataagtatattggagccaaactatagaggcttagggcaccagaacaagaggttctatgcagtaaatcaaatgtgtatgggcccactgtgggaatgacttgatatgcagacatttttaggttaatctgtacaagaatcagggttgtgcagcacatctcaaatcatagtgtccacaacagtcacgtgagcatcttgtaaagatgcagaacctgattaatacactctctggggtggggcctgagattctgcatttcttagtagcaagcaggtgatagtggtcgtgtgtgtccgcagcccccactgagtagcatcagtttacaacctggcttagagaaggaggacgtctggacagtcttatgtctttgtcattaaaaaccatcaatgctattcagtggcaggaggaggaagttcaaaagagggaatgtggaggcatctgtggtactcagagccagcatgccagagctcaccaaaaccatctacccttcccaggcctagttaaattggtcagcggtcaggactcattgtcactgtcctggagaaacttccacctcaggctccttaaggaccagctgtgggactacccatttttctcttggttcctcagccaacttctcccagtttgccttcgagtccgtggtggccatcgccaacagtctgcacaacagcaaggacctgagcaaggaccagcatgggaggaactgcctgctggcttcctacgtgcactacgtcttccgcctgccagaggtgcaaagggatgtgcccaagtcaggtagagttgccctgagtgtgggactctggtgggcggggcaacaccacctccaccccactgcagtgtaatccaaaataaaacatcctatgctgggtgcaggggctcacatctgcaaccccagcactctaggaggctgagatggcaggatcgcttggagcagtggctcacatctgcaaccccagcactctaggaggctgagatggcaggatcgcttggagcagtggctcacatctgcaaccccagcactctaggaggctgagatggcaggatcgcttggagcagtggctcacatctgcaaccccagcactctaggaggctgagatggcaggatcgcttggagcagtggctcacatctgcaaccccagcactctaggaggctgagatggcaggatcgcttggagcagtggctcacatctgcaaccccagcactctaggaggctgagatggcaggatcgcttggagcagtggctcacatctgcaaccccagcactctaggaggctgagatggcaggatcgcttggagcagtggctcacatctgcaaccccagcactctaggaggctgagatggcaggatcacttggagcagtggctcacatctgcaaccccagcactctaggaggctgagatggcaggatcgcttggagcagtggctcacatctgcaaccccagcactctaggaggctgagatggcaggatcgcttggagcagtggctcacatctgcaaccccagcactctaggaggctgagatggcaggatcgcttggagcagtggctcacatctgcaaccccagcactctaggaggctgagatggcaggatcgcttggagcagtggctcacatctgcaaccccagcactctaggaggctgagatggcaggatcgcttggagcagtggctcacatctgcaaccccagcactctaggaggctgagatggcaggatcgcttggagccagaagttggagaccagcccagggaacataatgagactctgtctctacaaaaaatataaaaattagcagagcatggtggcacatacctttagtcccagctactcaggaagaagctgaggcaggaggatcatttaagcccaggagttggaggctgcagtgagctatgattgcaccactgcactccagcctgggaaacagagcgagatcccatctcttaaaacaaacaaacaaacaaacaaacaccctaaaattccattttcgttttcaggacaatacaaaacttacatgaatgctgaaattatgtgtttctttatagatctttcttcctccctccttgcctctttttatgctctaaacacttattttgtctgcccatttgataatccctcactggtctttacccacttgctaatttatgattcagctgagaatctcttttttaagatggagaagtggtgactgatgcctacgattctagtataataaaggaaataatatatatccaatggcagtggttcttaaactttttgttattaaaaaaaatcccttttcacatttccctcaaactgaactattgaaataatagtaatgcatttccccaactcttcttaattatttacataagtaataatcaagtagaacttcttgtcagcatgatataaaaattagtgtcagtgagttcacaaaattgcaggcccaaataaacatgacacttttgttggtctgtgcagcctcatttctagtaaatctgaaaatttgattgagtttttaaaaatactagtgatgtggctgggtgcggtggttcatgcctgtaatcaatcctagcactttgggaggccaaggtgagcagatcacttgagctcaggagttcaagaccagcctaggcaacgtgacaaaagcccatttctataaaaattacaaaaattagccagtcgtggtggcgggtgcctgtagtcccagctactcgggaagctgaggcaagaggattgcttgaacctgggaggcggaggttgcagtgagctgagatcatgccactgcactccagcctggaggacaaagtgagaccctgtcttaaaaaaaaaaaaaattaaatagtaatatctcatagatttccataaccgcttgtgaaaacatgtcaacatttaaagatgaaaaacagtgctgtatacatcatataccgtaatcctcacaaggttcagatgactctatggatttttgaatctgagaaaacctcactgcatgaattgtaaagttgtcatttaaatattgacaaattaaaaatatccacatttttagcttctcatgagaaatcagaagctctagcaaccctggggtccatttcccgatggcagtaatagactggagccagtagtaccccctgcctttgtaagaggcatgtgttggctgtttaccatgatctccaccactccctggtgccttatgccccatctacttctctccaaaagattgcctcctaccccaaccaggatttgttaagaagtctctaattccaaggcctaatccggtggcttttcatccaccctatccctcttcaattccttcttaaactcagtaagtaactctgttcccctgtctgttgacatgtctctgcctggtggggtgcaggcgctcccactgccctcctagaccctcggagctaccacacgtatggccgcacatcagctgctgctgtgagttcaaagctgctgcaggcccgggtgatgagcagcagtaacccagacctcgcggggacacactccgcagcagacgaggaagtgaagaacatcatgtcttcaaaggtaggaaagatgtcaaaccgtggaaggggacacaggcttttttattttttaactaaaacttggagaagtaacacagaagcaaccactactgctgcccaccatgctggtcggatgctttaatgctcagctttggagtgattaacgttctttagaacagattaagaccattctgacagatgcagcagcaagaccagcatctgaggatttgctgagaactacttagcttgggtagcaaagttttaaagcatcaggggtttagccacatggagtcatgtggctaaaccatgcattttattttcaaggaaaaaaaatagctttaacttttgatacctggaaaggttgcctttaatttagttttgtttctttaatacctacctcttacgttcattaacatccacagattgattatctcacaaaaaagtccaaaggaacagccgggcatggtggctcatgcctgtaatcctagcactttgggaggccgaggcgggcggattacttgaggccaagagttcaagaccagcctggccaacatggtgaaaccctgtctctactaaaaataaaaacattggccaagcacggtggctcacacctgtaatctcagcactttgggaggccgaggtgggtggatcacaaggtcaggagttcgagaccagcctggctgacatggtgaaaccccgtctctactaaaaatacaaaattagccaggcgtggtggcacatgcctgtaatcccagctattcaggaagctgaggcaggagaatcgcttcaacccaggaggcagaggttgcagtgagccaagattgtgccatttcactctagcctgggcaacaagagcaaaactctgtctcaaaaaaagatacaaaacattagttgggcatggtggcgggtccctgtaattctagctactcaggaggctgaggcaggagaatcacgtgaacacgggaggtggaggttgcagtgagccgagattgcaccactgcactccagcttgagctacaagagtgagactccgtctcaaaaaaaaaaaaaaaaaaaaaaaaatcccaaggagcaatgccaaattttacaagcatataaaaactgacatcctgagagggttgatggcttgccctatgttgtttttccctctatgaattctttatttttttcatggtaaagctttactttcagaacagttttagagttacggaattatatactctatacccagtctctcctttattaacattttacattcaaatggtacttttggcacaattagtgaaccaatattcatggaatattattcattaagttcatctttattcacaccttctcagtttttctctaatgtcctttttctgtcccaggatcccattctgaatgccatattacattttgcagtcttgcctccataggctcctcttgctggaaacaatttcttagactttctttgttcttcatgaccttgacagttttgaggagtaatggtcaagtattttgtagattgtctctcattaggaattttttaaagattatgatattattcacataccataaaattcacccttttttaaaagatggagtatacgatccaacagtctttaatctactcacaaagctaccacgatgaattcttagcctgaattttttctccaatgatctgtggcctcagggtggccgagctattagagtaatatcatttcccctgataaagagaaatcaaaatctctaggtttagacacagacacagtttcacccttacaaattccagccacttgacactgtgtggtgtgaggaaggaaatctgcaggccagggtttggggctgggcgccaatactgccccgctgtgtggccatgggaaagtcatgtaactgtgctgggcctcatgtcctcatctctgcagaggtcctggtccctgaatgaacttaagaaccatctaccctgggtcttttaaaaacactggatttggccgggcaccgtggctcatgccagtaatcccagcactttcggaggctgaggcgggcagatcacgaggtcaggagatcgagaccatcctggctaacacggtgaaaccccgtctctactaaaaatacaaaaaattagccgggcgtggtggcgggcgcctgtaatcccagctactcaggaggctgaggcaggagaatggcgtgaacccgggaggcggagcttgcagtaagccaagatcgtgccaccgcactccagcctgggcagcagagcgagactacgtctaaaaaaataaaaataaataaaaaataaatgaaaaaaccactggattcaccccctgagatgctgatgatctgtagtttgagccatcaggaattattcgtattctatcctttttgacttacaaaaatcagttcagggatgtgctggagtgagctcatacctgttcccaaaagctgattgcttagttttccagaattttttgagccagttttgaaacagacattgttaaaattaaatcgtataaacttaaaattaaataagttatattaaaaacaaaggtaatctgaatgcaatgtggtatgctagattgtatcctggaacagaaataggacatgagtgcaaaaactggtgaaatccgagtcgttcgtgtttagttaatagtaacatatcaatgttagtttcttagttttgacaaatgtaccttactataaaagatattaagagaaatgcaatgaaagtcatataagaaatactacctttgtaacttctctgtaaatctaataataactatacaacttatacttcaaaattaaaagttcactttaaaaaggtaaacctagtcccttcctaataatttcactatatgctacaatatctaagttcttccttctttacgtttactgtgtctgtgtgatggaaatattatataatggtttgctaccacactgcatttctatgacatcgtgttggtagattgaaatcagttatgatgaaagtatttgtggcacaaaaattggcaaatgctacaaattacccctacccccctgacaactggttgttaaacatttgccagcacaacacaactcagcctcatattgaaagcccctttcagtaataccactttctgatcacccaggaaagaagtggtctgcagctattactgacagccttgatctttctatttttctttaataaaatgaaaatattaaatttttatgtggacagggttagcaattttcgaattattttgttgcatggggagaaaatgtctgatagagcatgagcactccacttcccttcagaggtagtttttgacaatgtattggtgtttaggagacagcgtggtgcagtaccgtactaaaccacagagagacactgttcccacacattttttcctggcgtcccctgaagtcacagactcctagaagggactactcagcagcccagattcttaaatagtttttaactgtaggttgctacacacaaactattaacgggtgttgtctcaagagcaagtaaaattaggtataacttcactgtctttgctttgttttatatttacttatggcaattgttttacctttgtaaccaggaaaaaaaatatgtataaaaaaatgaattctgaggttgtgatttccagatgtctggcttacctttccatggttggttgactgttaagccatggtttgtgtattttagatcgccgatcgcaactgcagccgaatgtcttactattgctctggcagtagtgatgctccaagttcacctgcagccccaaggccagccagcaaaaaggtactgaagagagcaatgtgaggttcatcccaggataagaacagaaggatttcctcatgccctcacactgtgcttgggaatagtcaaagtgctcccctgcctgtccctgatgtgctaacacacacacaccccacacacacttttgcagccctgtcctttacgccacatttgaccacctaattgcccattaactcagtgtttctcccactttctcatgcatcagaattacctggaagccttgttaaaactcatcgctggaccctacctcctgagtttctgattcaatagatctgagctggaggctcaagaatttgcatttctaacaagttcccagctgatgctggtccagggaccacattttgagaaccactgcattggcctccttttagtagagggaaagctgggcacaagtcatccttgacaaaagtgaatggcaataattaggtatcatttgtttcaataccatataaactaatatgaaatgcttcctcataattcttcacaatcagccttacctatgagttcagaaactttaaaagctgttaaactgcttaccaggatttttaaagcaacaaaattccccaatcatagtcccagcctatgtggtctgagggatggagggaaaaaaaactgtctgccctaatttcctctcttctaggcactcaagaatctcaccattatagtagctacttaagtttttaatgtctttgaagacctgtattaaaatgtaaatatggcagggcacagtggttcatacctgtattcccagcactttcggaggccgaggtgggtggatcacctgaggtcaggagttcaagataagcctggccaacatggtgaaaccccctcctactaaagatacaaaaactagccgggcatgatggcaggcacctgtaatctcagctactcaggaggctgaggcaggagaatcacttgaacacgggaggcagaggctgcagtgagctgagatcgtgccactgcactccagcctgggcgacagaatgagactccatttcaaaaaaaaaaaaaaagaaaaaaagggtaaatatgcttattgcaaaggataacacaggaagccatttgcaagagctgacatcacagggaaatgtttattaaacaggcaaggagggaatgagcctccccaagtctccctttggactggatgagggaaagaccaagtgtgggagggccggggcctggtgctgtgcactttgcagtattccaggcaccatatgtctagtgagaggtaccaggatttaactataaaaggaaaagtgaaaaaagatatggttaggctaaaaacaaattagtccacttgctctaaaatttaatattaggctatcacaggccctatgcagtgactggttataggtattataccattttcctttcttaaaaaccattatttgcctacagcctgacttctttaacccatgtcctgtttggtttcgcagttgccatgttttgacttgaaatgaccagaatagagacattttatttcaaagggaagtttggccaatatgtttccttaataccttagcagacagagttttgctgcttggctattttatataacctccagagcaaggtgttcttgtaataatgctgcccagaaagcagcatgaattactttaagaagcagcttatccttgtctaatctcttcttgccataagaccctggcagacaaactgacctattttctagaggcgacctttgaagctgggggagcatgtctttcctacaatgagaagatcaaggtgtagtccagttataatatgtgcacagttagaccacctgctagactaaaactcaaccccacgcctctctcaagtgagacagcttcacttcagactcacaacagcaaacaaatgtgttaacgcatattaaaattattaaggtttgactaacctcacaaaacgaagtgaaaccagtcgataagctgaaacacctaagcattctccattcctcaccactaacccgcctgggatctaattggttaaaatacccaagcatgtatacagagattttccttttgtcatcttttagtttagctaagtagctctcaaattttaatgtacgcaagaattagtacattgggttgcatgcgtactggactctgtgggtaatttttttttttttttgaaacagagtctcacttactctgtcacccaggctggagtgccgtggtgcaatcttggctcactgcaacctctgcctcccaggtttaagtgattctcctgcctcagcctccagagtagctgggattacaaccgtgaaccaccacatctggctaatttttgtatttttagtatagatggggtttcaccatgttgaccaggctcgtctcaaactcctgacctcaagtaatctgcctcctcggcctcccaaagtgctaggattacaggcatgagtcaacacacctagccctctgtggataatttaaacgactgtcaagagcaatgtttgctgtaatcagtttttgctttaggtgttgactttaaaacttaatttgcaaataaggatatgatattagggtgttcaaatagctttagctttcttacctactttcttaccagaaaaaaaaaatgagtttatctacgtttattccaggttttgtgggcataagatgaaagaaaaccacagaaaattcccagacatcatttttggcattaattagggtgaccaactgttctcatttgcccaggactgagggagtccccaagatgtaaggttttctattttaggaccaggacattatcaggcacactgtaatggattgattgccctacctttagtcttgaacttcttcctcatcaaaatgattgtcaggaatatgaacacatagccagatatgctgtagaatggaaaaggtataagtcaccctgtgcactatttgctactgagcagtaggtgacttgaagggaagtgaagacgcaaagtggagctgggggactttccaagcatctggccctgggacatagacatttagatgttgtaagttaaggctgatactactatgcctttcagagcccaagatcctctcataaaccccaccgatcctgcttcccacaatgccatatgggcattataaaaacaaaaattgtccagtctcctagagagtttagacaccatctagacagtggtccctaaagtgtaaccctggaccagcagcagcagcagcagcagcagcagcacccaggaacttgttagaaatgcaaattcccaggctattgaatcagaatatctgggggtggggccccccagtctgtgtttcatcaggccctgcaggagattctgatacacagaggccgggcgtagtggctcacacccgtaatcccagcactttgggaggccaaggcgggtggattgcttgagctcaggagtttgagactaagtgggcagcatggcgaaaccccatctctaccaaaaaaaaagaaaaaagaaaaaactagctgggcttggtggtgcacgcctttagtcccagctacttgggactaaagtaggtgggaggattgcttgagccagggaagttgcagtgagcgagattacgccaccgcattccagcctgggcgacagagtgcagccctatctcaaaaaaaaaaaaagtttgagaactgctgccaccaaccaactgattttatggatgagaaaactgagggtgaagagaggaatggcttgcacatggtcacacagagagttttcagcaggacccaagaggaaagtaagacagtaccagttttaatggctacccagaatgtttcccccgtagaatagagtttcactcccaggctgagtccactccctcagatgtgtctgtcctgtgcagcactgaccccagccttctatgcaccgaaatgtcctccagtctcaggtgatctcagcactgactttgccatccaccacttactgcctagaacatctaagacacatgcttcaggaacgaacaagctattaaattggggggaataaaagaaaagaaaaaaagtgttggtgaataataatagcctttgtttcacagcctaatttttgtggttcttatttagcatttccatgaggagcttgcccttcagatggtggtcagcaccggaatggtgagagaaacagtcttcaagtatgcctggttcttctttgagcttctggtgagattcttgcgcgtttgtatctgtgctcaataggccaagagaagcacacagcagaaaggaattgacattttgttcactgagttgcccctgctgaaaacctggggtggtttcttgaaatctaataatctctcacccctcccatccttcttccactaaattgtgttgcttctaccatgaaaatctatcgccgtcctgtgagttctcatcaccttcaccactctccacctggccacacaccatcatctctcatgtgcctctcgcagtgacatcctctttttcctgcctgtatccatttttgctcttggcccacccattctgcacatggcagccaatactaaacagagaatgtcacgctccttttaaaaaccgatcgatgattttcactgcactgagaagaaagcacaaatttttatcatgacctaaaaagcccttgtatgattctgttgttttcctccctctctaacctcatctcacgccacattcccccatcattcagccacatggtcctcttttggtgctttgaagatgccaaggccattttggcctcacagccttttccagattctcttcctgctccctaactttcacctccgcacccccaacacacacagtttctattcttctctgtagatttcagcttcagtggaaccatccccaagaggccttttctgaccacctaatactgtaatatatcttcctctattatcctccttctgagcaccctatttatttctttcctagtggttatcacaatttctaattgttttttctgtctcagcggttagattttcaggatttgggtctctcttgtgtattatcccatctctagcctcagcacactgcttggtaccatgcaaggcccaattaatatctgttggaaaacagaatgaaatttgtatatctgtttatcctaaaacttctaccattactcgagcagaaaagcaaaaggtatagccataataccttaattttaaaataaggggaataatagtgataactatttttttgtttaattattaatggaagcaaaaggattttcccatagaggcactaaaaataaacattttctcaatgttgataaacagagatgcataatgagatgatgttgaatgaaagaggtctaaagacatagacaccaactatataaaaatatatatgcaaacagttcagaggatttggagtaggttgagatttagtgataatgttagctttatattcattgggttctttcccctgtcccattaagtgaatctttttttttttttttttttttttaaagagagtctaggctgggtgtggtggctcacacttgtaatcctagcactttgggaggctgaggcaggcaggtcacttgaagtcaagagttcgagaccagcctggccaacgtgacaaaacccatccctactaaaaatacaaaaattagccgggtgtggtggcgggtgcctgtaatcccatctactcaggaggctgaggcaggagaattgcttgaacctgggaggcagaggcagcagtgagctgagattgcgccattgcactgcagcctgggcaaaaagagcaaaactccatctaaaaaaaaaaaaaaaagagagagggactaaagagatgggaggggttccacctaagctctagtttttgtatgtaagttgaagcccaagaaaaagggagaaatgctgaacaataggacacagagaacaaagggcaaaggaaacaaatgaaccatccactggggaggaaataggaagcaatgtggaatagagttcagaagaagtcaggttcatgccacagaaacacacccaggattcaaatcccatgaagttttgcaaagtcccaacctctgttttgagaagggtcccaaagcatggtcccaaatccttgccacagaaccacctggaggtgcttagtaaaaataaagcagagattctttctcaaagcactaaaattaggaggctggaggccagcattgtgcatttacctgtcttctcaggtgacttctaagcctgttaatgatccactggtctacaccacctctgttctgtgaatcctatacagagctacaggtcttttggaatttgtactcagacaacaccagaatttttttttcattccaaaagccgagctaattaaggtggtggctgcagctcacaagtcttggggcaagagcattaacaatgagacatgagctccatgctctggcaggaaagggactgggccataagacccattcccctcttgtttcttgaggcatgagaagtatcaaaaccgtcaccccatgccctttatatcctgcttctatttacacatcccacccaccatcatgtctctccataaagaagattcactcagcctagctctgcaaaaatgaaaaaattacctgggtgtggtaacatgtgcttgtagtctcagttactcagcaggctgaggcaggagcgtcactggagcctaggagttcaaggctgcagtgagccttgatcatgccattgcactccagcctgggcaacagattgagaccctgtctcaaaaaaaaaaaaaaaaaaaaaaaaaaaaagaagaagaagaagaagattcacttgagtcataatccagctatggataattcatacaaataattcattcccaatgcggaattcagcattgcttattctgagtggttccatgtggcatcttagagctctctttccaaaggaagtttgcattctctgcaggtgtaatgatgtctctgttcttcacagaatcccaataatagttggcataccaatagttggcataccaatgggagaaagaataatcacatcaaaactactgagcatcttactatatatgtgccaggcagtgttttaagcattttaaagcatcatctaatgtaatcattatgcaatcttgaggcaggaggaacttttattatcccaaatttacagatggggttggaggaagggtggtggccataaagagagtctccaagtcagccaaatgcttcagcagtaccacttcactgcccctaactgcttttggccttgcacatttatttactagggcttcgttggcccaggagagaaagcataagctaaagcacatggcccatcttacctctaggaagtcccttatggtaaacagatgaagttttttgggaagaaagcccctgctgatctaagcatattgcaggggtttgtcaacatgcagatcacccaagacaccagttctaccagcagcctaaaacctaagtctgtcaggttctggcaggacagagtttccgttgcccaaaagggttaactgaaaagcattgatcaaaaggactctgctcagcatgtatgggaggttcaggggccaatgaggattggtgagagcccccagggtacagcagctggcagaagcctttctctatgctagctctaaagaatcaagagtatagcagagtaactggggcctagaaaaatctggaggcagatgagacaatcttagaaaaggagcctggggccttagaaaaatgttgccactaccaggacctcactgcagcagggatgagggcagtggaagtgagtaactacctgggcctctctgttctcccacgtaatgatccccttgtttgtgctcctgttggccaactccaactggaagccaaaggttaagggggcctgagtgatgtggtccctcgagacccccttcccagcattcagagacagacagagaaggacaagaaatccatcagggagctggggtaggggcaaatggaaactatcatcccccagccagaactttgcaaggaaattgatctcagactcagacaaggtgcccaattcttcatacattgtttatgcatttgcctgaccaatgcccaggaagttatttgaaaaccaaaacagttttgttttgtttttttccaagaagcttgagaaagacaacagcttccttggccttagccaacaacctgggcaatttaacaccctctagttgtgtcagtgcccaagcgctaatgaacaaccactttggcattagagctgttaaacacaatgcttgggcgactttcacacttgctaatgaataaaatccctgtgcttctagaaactgctgagccagaccttggagaaatagagataaatgggtgacctagtttactcactcaggacatgaagttccacattaaggggttctttagaggtacccttactttaaatgggccacaaaggcccatatagggggaaagatttctgtgcctcgccccactcaacagggccaggcctccactagtgtttctactggatgttcttctctggagatctggaggacacagtagctggcaagctgctgacagtctggaaagaggccattggttggaagtatggtattgtgagaattatgtatttggttgtaggatggccaaactcagcagacaggagccaaatacagcagtgagttctgaaagccttagtgctgggatggttagcctgcccagaatcaggattggcattgcccaaaacaaagaggccttatcttcttaagtcctttgttaggagcatagtgagagagaggcttttttcggacaaaaatgggtccagttcccacccttcattcgggtcttctcaccaggtgcatgcggccttgtgggatatgaagccatctctgtgtcccaaaccaaagaggatgccgccatgaggagaaaccatggtttctctactgagctttagggtttgatgtccttaggtcttccctgagctggccatggcgttgtctgaaaacatgaaacacataaagcctgtgtctctggttttttcttattttgccttccctttgttttttctgtttgtttccatgctaacaaaaattgccagtgctgcatgcatccttagaaactgaattctgctgttagtgtattaacgttctctcatgtagctcctgggagtggaagtcccctcttcttccagtctcaacacagagggcaaatgtgggtggttcaacttccagtgccattagtagtagtagtagtagtagtagtagtagtagtattgcagtggctgtctgactaatctagacgcatacatgaaaacgttttcagagtgtagggacccaaccacaagaccttctagtcttccccatgttcctaatagtgtaagcaacttccaacaaggataagactcaccctcagatggtgacaagggggcccatattgacctgtgaatctcctggccccaagaagatgtccaaaaaataagcatgatcttgatttaaaattgtggtaggcattgagatagtattattctagtcataatgcagacagtcaccaattgacacaaggatatctatatatagatacgatatgtatatgtatgtatatccatatagatatatctgtatataaatatctttctgtcagttgacgaattgtttgcattatatatgtaaccacagtatacaccagtttgtgtcaattggtgacttgtattgacacaaagatatctatatagagatactagatatagatagataatctgtatatagatatttttgtgtcatttggtgactgtctgcattatgtaactaaaaattagacttatggaactcaaaatttcccctagaggtaatgttttccctggaggcaatgttctaaatagtggttctgtttccagctggccaacatttcctgctcaatatataatatagctaaaatttataggagcagaagataactgctggaaactatagaactgtttctggaaaaactgtgctccctcgagaaacactgaaactcaagataggaggaacatttctcccacgttctccttactgtagtttcaggaacagaaaagactttagttcgcatcaagaaccttgtgataaactgttcctttctgagtcatgtgttctgtcctatgatagaggacacctagctggttacaggagcccagctcaggtctgccttccaggatgtaggcagttgagaacactgtagctaaagaattaagctcctggctttgtcagcagcaagaagggagcctctgacttggggtcaaaaagaggacacccttcccacctcccgccaccatggtaaccattggtgtgtctgcagcattttagtccagagcttgctcgggcaccaccagcacagataaagtgtcagaaaatccattgttagagagcatttctgtgagtctttcccccttttctgcattgtacaagcaggtcaccaatctccatgttgacatttcctccatccccctccgcaggtgaaaagcatggcccagcacgtacataacatggacaaacgggacagttttcggaggactcgtttttctgaccgtttcatggatgacataactactattgttaatgtggtcacctcggaaattgcagcccttttagtaaaaccacagaaggtaactgtattttactctttattttctaaattgtttacctggaacatatattactttcataatcagagaaaaataagcatcattttaaaacaataattaaaatataactgtaatgacagttaaacgcagtatgttatactggactggaccctgatgtggggctggaaaattgttataaacaaattacacacatgaggccaggggttcgagacctgcctggccaacatggtgacatggtgagaccctgtctctactaaaaatataaaaattagctgagcatggttgtgcatatctgtaatcccagcaactgggaggcagaagcaagagaactgcttgaacctgggagacagaggttgcagtgagccgagatggtgccacagcactccagcctgggtgacagagtgagactctgtctcaaaaaaaaaaaaaaaaagaaattgcaatatggactgtggtttaaatgatcatatcaggctgggtgcagtggctcacacctgtaatcccagcactttgggaggcaagggtggtcagatcacttgaggtcaggcattcgagaccagcctggccaacatgttgaaaccccgtctctactaaaaatatggaaaattagccgggtgtagtggcacgtacctgtaatcccagcttctcgggaggctgaggtggaagaatcgcttgagcccaggaggcggaggttgcagtgagccgagatggtaccacagcactccagcctgggtgacagagtgagactccatctaaaagaaaaatgtagatatgaaagataatatttttgctcttaggaaatacaccttgaagtgttatggggtaaatgggcatgatatttgcaacccattctcaaatggttcagaaaaaaatgtttttatgttcatagaatgataaaacaaatgtagcaaaatgtcaagtattgataagcttcgttaaagggtatacagtagttctttgtactattcttgcaccttttctgtaagtttaaaattgtttcagaataaaagctaaaacatatataaaatggaataaatcaaatgtttaaaaggcagctacaaaaatcttaggaagcaatgtttattattaatcgctttgtcgttattgagaatgtgcatagtaccaagtgctcaggagattttcattcggttattcctcatggcaaactttgttggaacagcatggtatctccacattggcaggtgtgagaataaggcacagtgaggttgataaattttccaaaagtcacacacagccagcagtaaagccaagactggagattttagacccagatactgagtcacgtaaggcacccaggaggagtggccatgtggagaatgcggagagagttcgaggacctctcagcggcacggtagcaacctctttatcaggtccccatccatcccagtgacttgactggtcagcatggcctgaatttgcaaattgcatgttaacaaaagcaaaatagtttcaaaccatatttttaatagtgtcaaaggaaattgatttgtcattctgagaataaaggacataaacatgaaaaactgaatcccagattgctctgaagcactgtaaaatccctcataaacaggagcactgagaaataatacaaattaaaaattttaaaaataggcgtagcttattaattgggattcatggaggaatttaccctacggagtgaatacaccctgcggagtatgactctgacctctcttaggctggaaatgctgcctaattgaggaataaatttcttaggtaaaaactaattcttttatcctgattggattttctgtaataatccttaaaaattaagaaactgtctcattgaaaacagtaagtatttttcaagtcagtttgccaaaaaaaaagaaaatagttacaaaaaaaaaagttaccaggatataaaaaaaagtaggatccaacatagtatatagagaatgaggttaattatacacatataaatatgcatgtagaaaaaaaagtgactggaaggaaatgcacctaaatattaacagtgcacgaataattacttgattcaacctcacagtcatggctttagttaaaggagactcaactacttcgcccagtgccacccagaaggacagtggctgaaataataggacctgtctctcccaatgttcccaccagtgacctggaagttcaaatccagagtgtcccacaaaatgatttgggtgtttgtttgtttttaaggaaaatgaacaggcggaaaagatgaacatcagcctggctttcttcttgtatgaccttctctccctcatggatcggggctttgtgtttaacctcatcagacattattgcagccaggtgagtgtcccccccacccccacccccgagcgagccacttggttccttctcatataatgtgatgttcgttgccatggcacgctgtcttcttcattactgagttggcatgaatcctacacatcctgtgttttgcagcacgtccctcatgtctgtgccatggacattcctcagacatgctggtttaccttgattcctggagcatttaccgacagtgtagaagggtcaacagattcatctgtgggaattaaaatttgtgatatgatctgaatcttcaatttgacattcaacagaaaattaacatggctatacagtgctttcagtctttgacaagtccttgcgctcccagtctgaggtctcttttcacatattagggtaattaattaaattgctgttgtgatgctccgacttgaaagaacctttttaaagtgttcttaaataaaatcattcaaagagatttaatttcactgagcacatagcaaatatttcataaaccaagtgcatctatcagtgccatccccccagatttttaaatggaattattcatgtgctgtctccctcaaactaccttaacaatagtaatataaatagcagttattgttgctgctcctctccttccatatccctaatctagccactagtaccatcattactgctactactaccaccagccaccaccattctcattagtcccatgcccactatcaccaccttctccaccatcaccacctcccaccacctccaccacctccaccatcaccaccacctccaccatcaccaccaccacctccaccatcaccacctccttcaccatcaccatcaccaccacctccaccatcaccaccaccacctccaccaccaccagcatcttcaccatcaccaccacctccaccatcaccaccaccaccacctccaccatcaccacctccttcaccatcaccatcaccaccacctccactatcaccaccacctccaccatcaccaccacctccaccatcaccaccacctccaccatcaccaccacttccttcaccaccaccaccatcttcaccgtcaccaccacctccaccaccaccacctcctccaccaccaccacctcctccaccatcaccacctccttcaccatcaccatcaccaccacctccaccatcaccaccaccacctccaccatcaccaccacctccaccaccaccagcatcttcaccatcaccaccacccacctccttcaccatcaccaccacctccaccatcaccaccaccacctccaccatcaccaccacctccaccaccaccagcatcttcaccatcaccaccaccacctccaccatcaccaccacctccaccatcaccaccaccacctccaccaccatcaccaccacctccaccatcaccaccacctccaccaccaccagcatcttcaccatcaccaccacctccaccaccaccaccacctccaccatcaccaccaccacctccaccaccaccagcatcttcaccatcaccaccacctccaccaccaccaccacctccaccatcaccaccacctccaccatcaccaccacctccaccatcaccatcaccaccacctccaccatcaccacctcctccaccatcaccaccacctccaccaccaccacctcccccactaccaacagctccttcaccatcaccacaacatccaccaccaccatcaccaccaccaccaccacctcctccaccatcaccacctcctccaccaccaccaccattagctccaccatgaccacctccttcacctccaccatcacttcttccaccatcatcattgtcaccatcatcaccaccaccacctccaccaccatcaccacctctcccatcaccaccacgttctctgtggttagtcacttagtgactttagataagtttttccaattttatgggtcttaatttcctcagttttaaaataagaagggggggttgagagatttgagggctgatcaacgaaaaggataggaccataaaaagcagtgacatacaagcttcattgagcagcacttggacagggttacataagagcggaagcccctcccagcatgagaacagccataggcctgcagtgaggaggggaccatccagaggagcaggggaactcccaggggagaggaggattagggcagaagcttatagatctgggtgaggctgctccacagcacagtagggagtctctgggtcagagagctccaagggctgtagcagcttagggccctgtatctgcaaggctctatcttatcattaggaaacagctgtccatcgagattttatggggtctgcaaaggaggcaggcactaaatggatgaaaatctgcttatatgagctatttttgttaatgactgggcatggtaaaatttgagttaggtatgagccaagggatcagcaccagtcgacagtgaagaaataaacaaccgaggggccaatacacagaaacaatctttgacttgtttacataacacctctcctccaaaaaaagaaaaagacatgacttttctaaaggaagtcctgtctacagccataccaccctgaacgcacgcagtctcatctaagggaagtcctgataaggaagcagaataataaaaaagaatcctaaggaaacatcagaagtccccaagcatccccatcccatgcaccctgacccctgccctgcagcggatcttctgtcccaggacccaccagaatagaatggcagagggacacttcactcctccttgccctccctcttcagtatttaggattccaggttagtctgttttcaaaactttaagttgagtgtatgaaagataccctagatcaccactgcagacccaggcttagctactcacatgcaggctatcttcattcccgacagggaaataaggcaacccaaggtagatatctgccttccctgcaaaactcatgtttttattttctctttctctttcctttcttttctcttgctcactatctttctccttaaattcttcccttttcttttagttaccatttctttttttgtttctctccttgactcaaatgccaaagatccctagaccaggagtcaagaagcctgcatgctgattcctgggacaccattaattacttctgtgattgggagcatcagcctttgaggcattcatttcctcatctgcaaaaaaactaggctggattagatttatccactgattctgtggtctgtgtctgccagtgacatccacggatgttacttagcaccattagtggcactcaggcctcagaaggtcactgacccccattcgtggtgatttaattcattgatcccagctctctagatacaggatgaacttcataccttaagcaagttgtattcttacaaagtcgtctgactttatcattttgcataacctattatgttttctgccatctaaagattttgtggcaatggatataaccttagtcttttttaatagtcactaaaaatagacaaatccatttcctcaattactgtctgtcacttacaatgtgccactaagcaaacacccatcccttgggtaggggcattgtgggtcttgacctttgggaaggaagtttttggaatgcaccttactcctcttttcaaaacatcactcaaattgtttttgaaatgtctattttttttcttttgagatggagtcttactctgttgcccaggccagagtgcagtggcacaattttggctcactgcaaactccgcctcacaggttcaagcgattctccttcctcaccctcccgagtagctgggattacaggtgtgtggcaccactccccgctaatttttgcatttttagtagagacagggtttcaccatgttggccagactggtcttgaactctggcctcaagtgatctgcctgcctctgcctcccgaagtgctgggattacaggtgtgagccaccacacccagcctgaaatgtctgtcttgaatgatgtctcaagggacctatgaaagatacccatagtggggccttcttttaagtgccaatgtgttgtgggttcaagttccgatagccggcttgacccgacacctgttaatgagtaacctaagtgacaggcacatgaccaagttctaatcccttcaatgtgctggtggctccactggtccaaagtcagccaggagtgcacatcgaaaggttatgggatctggtaactgtgcttacatagaagtcatatgttttggttttaaaataatatataatggcatttacttattttaagtggatgtctaactatgaattaattctgtaggcaatatgtcccacaacacattggcttcttgtaaaatggctgaaaatatgtgttcatttaaattatattgtttagtctgtaatcccagcactttgggaggccaaggcgggaggatcacctgaggccaggagttcgagaccagcttggccaatatggttaaaccccatctctactaaaaatacaaaaaattagctgggcatgttgatgtgcacctgtaatcccagctactcgggaggctgaggcaagagaatcgcttgaacctgggagatgaaggttgcagtgagccgagatcatgccactgcactccagttcaacagagcaagactctgtatctctctctctctctctctctctctctctctctctatatatatatatatatatatatacatatatatatatgtgtatatatatatgtgtatatatatatatgtatatatatatatatgtgtatatatatatatgtgtatatatatatatatatagtttaaaaaacaaactactcttgaagtgagtgaagaggaggcatgtctatcacaaggatgatgcttcatatttctgtgctggggtggggggtgataatgatgaaatattgaggagctcaaggtgcatcagcgccccttccttcccctattttgcctttagaggagctgcctctgagtctgggtctttcagttgttcagcttgcctgggggaagcaaggggtctcttccagacagtcacctttttctgcttttcattgcttgcttcatggtttattttttaaaggaagatttttcctaaaaactcttctagctttctttctctttcttctccatttcctcctctctcagtctgggacaagctccttgagttttttgcaggtactatgtactttgctaaacagtttgatgcctttctctagggaactggttctacaactttccaatggggcctttaattagaaactacgagagaacacttgtagtataaaagtcatctagtcatattctattagtttcatacaggctcatatgaggtcaactcctttcatttagtttctcgaacatagtagagtttttgtaaaattaattatgttacggtgaagatgtacctcaagattttcagcacaggcttcccatggtattaaagatttgataaagtggaaatcgggataagaatcctcattctggacagctactaggctagaatcactaaggggaacagtaatgaatgaaaatttattagacctctctgtaatgcagaatttaccatctgttgcactatcccattagtttttattaaattgattgccttaacctggagagaaaggatatttttgtgtctgccaacctcaactccacttaccttgtaataaatgtttcattcctcttttcatttttcttcccagctgtcagccaagctcagtaaccttccaacgctcatttccatgaggctagagttcctgagaatcctctgtagccatgagcattacctcaatctgaaccttttttttatgaatgctgatactgctccaacatctccttgtccttccatatcttcccaggtaataaaagaattatttaactaaaagaattattcaagctatttcatttaactagctcagtttaatcatgtatttcctataaaggttagtcttattaatttgacaaaaaatcaaacaattcaaaccagatcaagtatgctaccctgaagttacaccactagctaagaattaacaatctaagtaattggtttctccccaggctcaaggctccctgatcaggttaagtaaagccaagaatccaataagccctatgaaatttagaaactcatagaaaagtctcaaatcttcctttgtctgacattagccaattgttatattatgcaaatagaggattccaaagtaaataagttttggaaaccatgtattcaccaggtttctttgcagcaggccctctaagaggttttaacttgttcatgtcaattgcaaatgcacgagaagcagaagaggaaatgggaggaggtgtgcatgataagcagtgattccccaaatgatttaacatggaaaccccaccccacctcatacattttttgaaatgttactctggaataactttaagaacatgctgtttgatagtcacattccatttatagggaacacatcagtagctcagagcatcaggcaaaatttctcattattaggttatatttctgttgcatattccttgatactagtacaaaagtgaaggcttgtcttactaattgaaaaaaaaatcttagccatatatgccatatggcatgatccagatattagctacatgaccatcttactgtgaacagggaaagatctgactcacaagcagcaattcaaaatgtataaactttttgctccatcctgcccagcagcttaagtcctaaaacttccctggactaagcttaccctaggttctttcccaccttccccttctgactgccccagggagtggccaaacccaggggccaggctcacaaaaccatgaaggatttctaaagacactttagatgctcttaatgaaatataaagtgtgctcccaggatacaaatacaggacaggaattactgaggaccggtaaatctaatacttccctccctgacatcacttgtagttccaggccagcaaaagtctgacaatgtgcttaagccaaattcagaagtgtagctgaggccgggcacggtggctcacatttgtaatcccagcatcttcggaggccaaagggagtggaatacttgaggcaggagttaccagcctgaccaacatgatgaaaactcatatctactaaaaatacaaaaatgcatcaggtgtggtagtgtgactgtaatcccagctacttgggacgctgaggcatgagaattgcttgaacccgggagagggaggttgcagtgagctgagaccatgccactgcaatccagcctgggtaacagagtgacactctgtctttcaaaaaaaaaaaaaaaaaaaaaagaaggtacctgagtaagcagggccttaaacaaagggggcatttggttacagaggaattgcctgttcccagccccaggactgggtgaggttcttatttctctgtccaacttttatgctaggatttttatcttcagcttttgatttcaggtgggaaagggagcgtcattcatttttcaacagacccggggtgctttattttcatctttcccgctgggcagtcttctctctgtgggtatgggaaagtgcagtaaccactctgtgcctcagtttccttgtccgccttatctggcaccagagtacctacctcactggggagggctcacgaagcctggctggggcgaggactcagtaaacactggccatcgctattttcattccagttcttgtggctcataaaatggctccttacgtttctgtagaactcaagctcctgctccagcttccaggaccagaagatcgccagcatgttcgatctgacttccgagtaccgccagcagcacttcctcaccgggctcctcttcacagaactggctgctgccctggatgccgaaggggaagggtatgtttctggcatttaaaatggaagatgaagccaaaaaaacagatgttctttaataaaatttgcagtctagcttctcacacttggtaaaaaactctactgtagttgaccagttctgaggagtagaaacatctgtcttgagaatatggtacccataagcacaaggcacaagaaaggcctttcttgtgtagaaaggcaccagggatgggtaagaactacaaaatgacttttcttggtcaactatttcagtggaatttaccagttctgctatagcaggtttcccaaggatgctttgattagtgaactccctaggagcaaagccatttttaacaaaggggatagcatgcagaggcaaccacaagatgtcacttggttcaaagctgatgaaggaaataatggctgctgagaaggcagctgtcccatgcccagattaggtttcttgcagacagtgcttctcaggccaagagacaccacacatccagggcttctgaatccttttacctcttatctatctgattactcagggacatgtggcagtatctagcctagaagtcaacagacagagaggtagaccacccccttctttccttctctccctatgctccgtgagctcatggagtcagaaacccacagcctatctgattggactgaaaaagataatgccttctaaaatattattcattccgttcaacaattattgaatgccttccatgggacagacacagttaggtgttagagtacatcagagatatatcagtgcacaaaacagacaaaattcgctgcccctcaagagctcaccatccagggactcagattcaaagatgattaggattgcaaagtagttgagattcaacacttctggtgtttagattaggcatacagaattgcaggaacttgcccactattccataacagagaacgaaatctaaagccatggtcttcccagtcccttcccaggacccactctcctataccaaaccatctccctgcacagggaacctgttcccatgactcctatgctaaagaggtttccagaataatgtttgctaattaatggtagcattgctgtatgttatggatggatttttatctaaatggaatttctcaagttctctcaaagtgcttacaatttagtgaaggaaacaggaggttcctgcatgaaacaaatacaggagcacatcgagttcgtgcaactgcaacagtcacatgtgtcccaagctatgtacccaggctgacaccgctgaagtgactctatgtctgcgtctcctggcaggatagtgtggggaatctcatgcttttagctctcaattctgcctccttccagataaactggcctgagtatatcctttgagaacttcactttccatggcttcaattctatcttctcttctcaactctaactaaatttctcccaattatctcagtagaatgttctaccctacaactaacataaatttccacagcaacaaaaagtgcaccgaacacttatgctaataagtaagatactgagaagaaagtttgaacacaaagaaaattgccttcatgcacaaacatgtacatacattttcttagttgtcctttaatagcagtactttaagtgatttctagaaacatctttagtatttacaatagcgtagtttctattttctattttcattctagctggaaacagccatgacattctgttctggattccttgtaaaattgttgctgttatattactagcaacaaggtagagtatattcagagataatcatgtaattatgtttaatcaggtagatacattcttcaaacacacacacacacacacacacacacgcacacacgcgcgtgcacatgcacacacacagtaccctttctcccccaaaagagtaattaacagtgtaactcctttggcaacacagtaatccctgattgctgggttgtcagttactctcctggaaagtcattagatacactgtcacaacttcatcatgtaagctaaaacctcagaaaaatgtcatgcttcaacaatacttcctattgatcagcacttcctttttttttttcttttgcttccaagacagttggtagacttgccaacacctgtacatccatggggcaagggccagaaggacgcatctcagtacctgaacccctagggagctacagctccagtttccactgggtttcccttggatctctgacacctgggtatatccacaagtgtctatgcatcgttaaatccacagtgtttttcaagcatttagaaattgtctatcatctttgtgttaagccagcaaattgcaatgcctaattcaaaacacaacccattgccgggaccacagactaagaacaagaaaaacttttgaaatgcaatttacaattatcttactttagccacagtgcaagagtctgagtcatttaaaattttggttaatattttctatataacgttgaattctgatgtagccttattttgtttgaaagaaaaaaatgtatatatatgtatatattttttaaatctggattctttttttattattatcatactttaagttctagggtacatgtatacaacatgcaggtttgttacatatgtatatatgcgccatgttggtgtgctgcacccattaactcgtcatttacattaggtatatctcctaatgctgtccctccccactccccccaccccatgacagtccccggtgtgtgatgttcccacctatgagtgagaacatgcggtgtttggttttctgtccttgcgatagtttgctgagaatgacggttttcagcttcatccatgtccctacaaaggacatgaactcatccttttttatggctgcatagtattccatggtgtatatgtgccacattttcttaatccagtctaccattgatggacatttgggttggttccaagtctttgctattgtgaatagtgccgcaataaaaggattataaatcatgctgctataaagacatatgcacacatatgtttattgcggcaagatgtatatttttaaaattgaacatctatgactaggttccagatactccactatatattttatttactttttattatagtataatttatataaagaacctgaatcctaagtgtaaagtgcgattaatatttcctgtgaatatatttgagtaaccaccagtcagataaaaaatataatattccattatcctctctcagttacaggcccccctcaagtaaccactattctgactcttattattagaaattaatactgcctgttgttgaatttcatagtcttttgctgaatgttgtgactgtgacatcctttagtgtggtcgcatgtgtcagtattcattttttttcaactgtatgtcatattcctttgtctactataatttctcttctgtaaattgacatttgggctgctttctatttgtgggtattgggtattatgaaaacagctgccgtgaacatgcctgtgcatggttttgggtggacgttagaactcatttctttggggctataaatacagcctattttttattttaatatactgctcttgaatagtttaataaatatgtgtacatggtcttaacaaaatgtcaaaagaatatactctgagctaggaaaagaagagcaaacaagtcaaagcaggaagatggcagggaataacaaaggtgatagccaaaataaatgaaataaagaatagaaaaacaatcacggaaatccgcaagatgaaaagcttgttatttgaaaagagcaacaaaattcaccaatctttagctgagctgaccaagaaaaaaggaagaagactcaattactaaaatcataattgaaagattcaacacaatcatatcacaagagaccttacagaaataaaaaggattataaaagaatacgatgaacaattgaaagccatcaaattgataacctagattaaatggataaattccttaaaaggtacaaagtactaaaattgactccaagaagatatagaaaatccaaatagacctacagaagtaaaaagattgagttagtaatcaaacttcccacatacacctactatgtacccacacaaattaaaaatttaggctgggcgcagtggctcatacctgtaatcccagcactttgggtggccaaggcgagtggatcacctgaggtcaagagttcaagaccagcctggccaaggtgatgaaaccccgtctctactaaaaatacaaaaattagctgggtgtggtggcgggaacctgtaatcccatctactcgggaggctgaggcagaagaatcatttgagactggaaggcagaggttgcagtgagccaagatcatgccaatgcactccagcctgggcaacaagagcaaaactccatcacaaataataataataataataatatattttaaaatttaaaacttcctacaataaaagctcaaacctggggggctttactgatgaattctaccaaatatttttaaaagaattaattctaattttttaccaacttccagtcttctcttccaacgaatggaagaggtggaatacttccccacttgttctatgaagctagcattaccctatactaaaccagacaaagacatcatgagaaaactacaggccagtatctgatgaatatagatgtaagaccctcaacaaacactagcaaactgaatccaacagcatataaaaaggattatacaccatggctaagtaggatttatctcaggaatgcaagataggctgcatacctgaaaatcaattgttgtaccatattaataaaataaaggacaaaacccatacaatcatcttagtagatgcaaagaaaagcatttaataaaatctaataacgcttcctgataaaaacactcaacaaaccttttaggaaataagagaacttcctcaacttgacttaagggcctctatgaaaaatccacagctaatgtgacacttattagtgaaaaacagtgctttatccctaagattaggaacaagacaaaaatgtctacccttgccacttctattcaacatattaggagttctatctagggcaattaggcaaaaaaataaaacaaaagacatctaggccaggcgtggtggctcacgcctgtaatcccagcactttgggaggccaaagtggacagatcgctttgagcccaggagactgagaacaccctgagcaacatggcaaaacgccatctctacaagaaatacaaaaattagctgggcattggtggcttgtgtttgtagtcccagctacttgggaggttgaggctggagaattgcttgatcccagaaagcggaggttgtagtgagctgagatcacgctactgcactccagcctgggccacagagtaagaccctgtctcaaaaaaaaaaaaaaaaagaaaaagaagaaaagaaaagaaagcatttaaattggaaaagaagtaaaactatctctattcataggtggcataatcttgtttatagaaaaccataaggaatccacaaaaaactccattacaactaataaatgaattcagcagtgttgcatggtataagatcaacatacaagaatcaattgtgtttctatacacttacgatgagcaatctgaaaatgaaattaagaaaacaatttcatataaaatagcatcacaaagaaaaaatatttaggaataaatgtaacaaaagaaacacaagagttatacactaaaaatgacaaaacactgttgaaagaaagatataaataaatggaggatatcatatgttcatgaatcagaagacttattattaaaatagcaatactccccaaattgatccatagattaaatgcagttcttctcagaattctagcttgcttttttttttttttggcagaaattagcaaactgatcctaaaattcgtgtggaaattcaagggacccagtatagccaaaacaaccttgaaaaacaagaacaaaattggaggactcacacttcccaatttcaaaacttactacaaagcaaaagtagtcaagactatggggttctgacatatgatagacatatagatcaatgaaattgggttaagagtccaaaaataaatcttcatatttatagtcaattgatttttgacaagagtgccaaaacaattcaatgggggaaaatagaattttcaataaatggtgttgggacaactgggtatccacactcaaaagaatgaagttggaccctatattacactgtatacaaaaactaactcaaatagatcaaagacctaaatgtaagagctaaaactataaaattgttacataaaattatagaggtaatcatcatagacttagaaaaggcagtggtttcttagatatgacacactcgaaagtatgagtaacaagaaaaaaatagataactggacttcagtaaaattaaaacttttgtgatttataggacaccatcaaaaaaatgaaaaggcaacacacaaaatgggagaaaatatttgcaaatcaaaaacctaataggggacttgtatctggaatatatattttaaaatcttacaactcagtaataaaaagacaaataactcagttttttaaaaggcaaaagatcagaatagacatttctccaaagaagatacagccataagaccatgaagatgttcagcatcattagccgtcagggagatgcatattaaaatcacaattaaataccacttgatacccacgaagatggatataataaaaaagacaggtaataaagtgttggcaagaataaaatggagtcttcagacactgctggtgggaatgtaaaattgtgcagccaccgttgaaaacaacttgctgattcctctaaaagttaaacagaggctgggcgctcggcggctcacgcctataatctcagcactttgggaggctgaggtgggcagatcatttgaggccaggagttcgagaccagcctggccaagatggtgaaaccctgtctctactaaaaatacaaaaattagccaggtgtggtggcaggtgcctgtagtccccgctacttgggaggctgagtcagaagaattgcttgaacccaggaggtggaggttgcagtgagccgagatcgtgtcattgcactccagcctgaacaactccatgtcaaaaaaaaaaaaaagttaaacagacagttaccatacaagccagcaaatgtactctgaggtatgtacccaagaaaagtaaaacttaaaacttgtatacacatactcatagcagcgttggtaagtcacaatagctcaaaagcagaaacaatccaaatgtttatcagttgatgaatggataaaattcaccaatggaatattatttagcaataaaaaggaatgaagtactgatgctacaatatgataaacttaaaaacatcatgctaaacagcagacccagggttagaacacaggcagtctgtttctggattctatgtagttctatcctatattgcttggttttccagggttagaacacaggcagtctgtttctggattctatatagttctatcctgtattgcttggttttccagggttagaacacaggcagtctgtttctggattctatgtagttctatcctgtattgcttggttttccagggttagaacacaggcagtctgtttctggattctatgtagttctatcctatattgcttggttttcacagtcacctcattgcttaggagcgttttcatcactcttgactgtttaagagctctttagtcaatttcctttcaccataacctcttgattcctgtgttgtgccaacagaatcagcaaagtacaaaggaaagctgtcagtgcaattcacagcctgctaagttctcacgacctggacccacgctgtgtcaaaccagaggtgaaggtcaaaatcgccgccctttacctacctttagttggcatcattttggatgctttgccacagctctgtgactttacaggtaatggcccttctgttttctttcttggattgttgggggcccctgccaaatgccccatccgaatgagatctctgtcattcgttccagtgctgatatgttcatatgagcaattcttcacaaaaatggtctccaaacctctttaacactggccccaatcagttaaaaaaacaaaaaaagtcacatagccccatatgtgttttttgtttagaaattatttacttgtttcttcattcattcatttattcattcattgatctgctagtatggaatgaactttataaaccatacaccacaaaggatgaaataataacaagattactgcctttggagatcgtgctctaacaccttgaaataaaggtgttccttcccttttcttttatgaatatgtaagcaaaaaagcggtctcaaatgaacccaactaattgctccatgcaaaaaaaaaatcatggcatatgtcaatattagaaaattctatcatagcagagaaatattgcccttggcactaagtgactaattttgaggttaatatgtctagattagcaacaagatgaaaggataagttgtcttaaaggggttttgtgaaaccccagaatctatttacaaattacattgtggattaaggaatgtagagggaaaaaaatcctcccaaatagaagaacttcttatgttgacctgagaaaggcagtccattggcctaccctctccacagcgtacgtgtgtgtgcacgtgtgtgcgcgcgtgcacacacacacacacacaattcctatcccatcagagtagttcttgcttttcctccagctcaagggaagttttggaaatgtccatgctgctctcttggcagctgaagggtgctgggatctgggcaatgcttccctgagccagcctctttatagtcagtcatccttgaaatcttggaaccatccaggttttcccacctcctccaaatggaaagtgtcatgtgtgactaaattgtttataatactattacggtgacaagtatttagttcatgaaaatgggaccaaacgcctatagtctttaattcatacaaatcataaaatgaaaagcaagtattcctgtggaagtaattctctcctttcttgaaaaaaatcctctagcaaactgctaatggagtaactcagaagagaaaggttgagacaggggttagggtttgtagagttctgttggggccagagtgcaaggaaatgatagaaacaagctcagcacacagggctgagcaagctgcaccatgaggtcagcagcttcctctagcagcgcctgattgcgcggaattgaaaatggagttgtttttaacatttacagacataatgcagagcatggcatgtgacttgtagcccattttgagaatccttgatggcaagtttctaaaaagttccatttcaagagcttgcttgttcccaaagccaggaaccactttagcacacattatccgaagttttcttgtcaattagaatattccgtatcagtgactcggaatcagaacttttcaacatttggtctccaagccttttaaacctcaaagacttctttgtatatgcgttgaactttatgatcatgatgtagctgatgagagaaaaaaacagtgaaaagtattttattgttataggttacacagtacatctattaaatatggaatctttaggttgataaactcataagaatacagtctttcaaaaagatgcatctgaattcagattccagccccatttattaatataagtgacctttgaaaggctcaacctttccgtgccttcctttcctctgtaaactataaaaatgtgataacgatgtctaccttttaggtttacgataaaggtgaaactagagaacttctataaaagcattttgcacagcacatgtttgtatctttcccgatttttcttgtaactataaccctatggcaattaaggggaaataagaatgtgtctctatgttagttgtgataatgttatcaggtcttgcataatttccatgtgctgtttatttaaccatttgtttaaaatcccaatggccttaataagtatttctaaaaattgggttttggctcggtgtggtggctcacccctgtaatcccagcactttgggaggccaaggtggacagatcacttgaggccaggggttcaagaccagcctggccaacatggcgaaaccctgtctccactaaaaatacaaaagttagccaggcgtggtggcgcacctgtaatcccagctactcgggaggctgaggtaggaggatggaggggcagagattgcagtgagcggagatggcgccactgcactccagcctggatgatagtgtgagactttgtctaaaaataaataaataaataaataataagaactgggttttgttttcacaactttagtagaagaaatgttatttacactcaaatttttctaaataattgaaggcccagatggctgtaatgtcaacaggtctagaaaaacatgaatttttaggaaaacatgagtgaatcaatcagttgtgaatgttttaccacacttttcccagaactgcttgaaatattaatagtttttgattgtatactggtagcattcttaaaaaccagacttttaaacggtttatcgtttttttgcttgcatacatctagacctatctataaatatgggtatgtctatattacatagatacaataaattgacattcattttaaacatttgaaatatgacaaattattgctgaacttgtgataatagcttattattctatataaggtagttgcttaattctgtaattgtaggtgtcttctatttggtcattatttaaaataatgccaattattagaatagagaatgaagtttaaaaaattatgttacaggaaacaattatggaaggtttgaaaactttttgttcacacaatttgaaaaattaatttctagcctaatcttgtgctagacattgtctcttagcctgctgtgttttcctataggtgatagcagatacataatgctaaacatcaggtttgaaattactgtgctgactttagtgactgagaagtatcagtctcttattgggtaggggacatggggaaatgtcatgtttgacttgacatcacaaacgatgttttcattgcagttgcagatactcgcagataccgcaccagtggctcggatgaagaacaagaaggagccggtgccattaaccagaatgtggctctggccatagcagggaataatttcaatttgaaaacaagtggaatagtgctgtcttccttggtatgttggtgcacatgtgtctggttgatttttcatttcatgtcttctgtcttctgttttgttttgtttgtttgtttgttttgagacagagtctcactctgttgcacaggctggagtgcagtggcgcaatctcagttcactgcaacctccgcctcccgggttcttcatgcctcagcctcctgattagctgggattacaggcgtgcaccaccacacctggctaattttttttgtatcttttagtagagacggggtttcgccatgttggccaggctggtctcaaactcccaacctcagatggtacacccacctcagcctcccaaagtgctgggattacaggcgtgagccactgtgcccagcctcttctgtcatcttctgatgggagaactcagcttagagcaggcattgattatttccgcctcattttgctggaaagaatcattgtgaggctggcagctgaggtgcacacaagtcagaaagggttctggcaacagcaagagatgtgcagatcaaattcaggcagtcccagtggtgctgagttcaagttcaagaaaccggaaaagaggaaaacttgggaaatctgaaatccttgcaaaggagatcaaaccaaggctctctgagggtggaggcttaggctgtgttcagtctatgtgtgtgtaattcatacagtgtaatgcctccaaaaaaaaagactgaaggaggctggtagcttagcgtaagggcttcttaaacaagactgcagcttttctaggaccccagggagcctaaggagggttgtttggctctgtccttttgcatggactctgtgggctcaaagaggggctcctctgggaatgtatcctctgattcagttgaggtgggattcatctctgttcattgatgagctctgactatcccttgtgaagacagcactgcatcctccaatgtcatttactttcacatttcaatgtagggtatagatgtgcagagaatttaactttcttctcccgtgagaaagcagcatcctgacctaactcttcttgctggatgactttcttgtcttccttcctgcacttagcaagctccatcaccatgaggattggggggacagtgaggcaggaagatgagacagagaaaagacatttgagatttgacatcaccgatcttactgttggagaaatattgtgtgacctcctccacctttctaatatccgtcttaccaaagttagctgcttgaggtggtatatgccttttacattatttgcctctaagggaaaaactcaaaagcccaaagttcacctgttagaacatagtccttgtgaggttgtatctcaagatttcctttattcttgtcaacaaactcagaataactaaagttaaagttgctttataacctctattatttccatccaaaactaacatttccctcccatacccacaaattcctcattgcaatttcaccagtacattccactggatattagctacgctgcatgaaccaagggtgcagcctcattgttgttgtttgtgttgatgagatgagtaacagagagtgcgctcagcactttaaaatgaatacttgtggccaaaatattaaagcaaatagcctgaacccccacaccccagccccaggcaaacataaattatggttaaacttccattacagagaactccacaaacatggatttgattaatttgctgagcagttcatgacccttatgttatactttgcactatgtaacaaagaagctaaatcttgaacagcaagcttattcatggcacccagccagtttccttctcccctgtaagtctaaccctctgctgcccagcacgaaggagaaatacttggagatcttagcagcatgaaagcctctttgtatcactgggattgcagcacgcatgatcaaggcccaggggtgatcaccaggccacactgctcctaagacagaggtactcagatacgtggctgaaagcctagctcaaatactgccccaggtgagcctctttgctgagtagcgctactcaaagaacacagcttcccctgcctagggaaggcagggctactggcaatagatctccagcctagcagtgatgtacagtcatggtattttaagagaacactttgaatttttctgttgcttgactgttaagcctcaaatttttctgttgcttgacttcttccctggcctccatcccccaatctgcctcccttcagccctataagcagtacaacatgctgaacgcggacactactcgcaacctcatgatctgcttcctctggatcatgaaaaatgctgatcagagcctcattaggaagtggattgctgacctgccatcaacgcagctcaacaggattttagatctacttttcatctgtgtgttatgttttgagtataaggtaagtctggagtggcacaactttataccagctcttatctctcaattgcaattctgtcttcttactcatcccctttgtttgggccatggaggcatcattaatttttctcatttctgtattcaaatccataacccatttgtaggtatagatatgatcatttcacagggaaaggatctctgccttctgcagagagaaccccatttctgttgacagagttttggcccataggatgctccagagcagcatctcagtgaagcacatgtcaaacttagctggcatcactgtggagtgtactgttttggtaactctccccatcaacggagatctcaccaaaggacatgtcctcctacctctgtcttgtccagggaaaacagagttctgacaaagtcagtacccaagtcctgcagaagtcaagggatgtcaaggcccggctggaagaggctttgctccgtggggaaggggccagaggggagatgatgcgccgccgggctccaggtgtgttggactggcccttccctgctctctgtcaagcagtttttcactgtttgtggggaggaatgtcctcccaacatgattagacaccattactttcttgagatatttacggtagtgtcagagacagcggattctgggagtctgtgtgtgacatttgtgttagccctgtgcctgtgagggaaagcgctgttctacaattgtaggaaccctgaaaacagcaccaaatgacatcttttaattaaaactcgttgatggtaaaaggtcacctctaagaatgtcagtcatggatgaggtggaaggtgtttccctcaaggctgaggcctttctatgtgacctttggctagtctatccggagcatggtcaagaaactgaacagttctggccccaagatcatcttctcgatcattcagggcactattagaatggaaccagttccctgaaatggcttcagagtgtcccagtcattcaaggattccaccacaggaggaatgatctcaaaaaggctgagcttgaatagaatgaaatccccaggtaccctcagtcttattcaccatgctcaaagtaaaacagagtgacagcttattgtattcgaagggacacagtggcagggaacttggagggagctcatagttttcagtggtggtcaggcaccctcatttgacacccatactttcatacccaataattcagtaagcccccagagtttcacaggaatcctctgctcatgagaaatgtctctctgacactcagaaaggcagaggttcttcttatattctagtctatcaatcaaagagcgggccaacttggacataggtgtggcgactttgtctcctaccagcaacctgcatggactctaattagcccgagaaatggtgctgaggcttctcagttgagcttgttatgaacttctggttatcttggagggtttcatgctaatcaaattcctatcatgcatttcttaactcctagggaacgaccgatttccaggcctaaatgaaaatttgagatggaagaaagagcagacacattggcggcaagctaatgagaagctagataagtgagtcactcggcaactttctgctacttttacctaaagtccaaaactatttttcccaggctgcttgtattactgaaacaactgcatccttccaagggttagaaaatgaaacatcattatctgtgtaaatacaattcatccagggacccaggataatcaaaggtatagggagttgtggtttccagctcttaaaaatttgtcacattgataagcatgtaaagaaaactaatatttctttagcaacctcagatggcttaataaaagcagctgattttgcagggagggtagcagggaaatagagaaagcaggacacggtgcctaggaccgtatactttcaaatcgatatttcctttctggaaatatgtacaagatatacattcagatatatttatgtcagtgctacttaaagttgttttttaaaattgaaaacattctaaatgctccagaatagaaaaatatatttaaaagttggattgccatcaaaatgttttaaaatcatcttaatgacatggggaaatgcttatgacataatgttaaatgaacaaaggcagggtagacacttggttttctagtagtgtgtggctcacgcctgtaatcccagcactttgggaggctgaggccggtggaacacctgaggtcagtagttcgagactagcctggccaacatggtgaaaccccgtctctacaaaaaatagaaaaattagctgggcatgatggcagatgcctgtaatcccagctactcaggaggctgaggaggaagagtcgcttgaacccgggaggcagaggttgcagtgagccaagatcgtgccattgcactccagcctgggtgacagagcaagactccatctcaaaaaaaaaaaaaaaaaaagaacctcaaatctctgatgacatatagtcaatgtattttttaaaggctagaaggaaatttaccaaaatattaattgcggttttctttgggtgctgggaatatcggtaattgatgttttctcttttatactttgctatgtttcctacagtagatgtgtattataatatatattgttaccagaaaaaaaattataaagaaatgaaagaataaaaaaacctgtttggatcaaaatctatgctatagatgaatagatatattgacgtgtattgctatatatgcaacaatttagacatatgaaagctaaaagtatatatgtttgactagatagcacatgtttccgataccgtttagccacaggtagcctaatgagtcccagggtttgctgagcaaaatgtcgtagagctaaaatcacccctcacacacagttgacaaggtaggataccccatgggtgatgaagcacccatcaaagggggtatggggcagacttgattagcagtgctgttttgtaaataaatgtgagttaatatctttattgttaccacaagaatgaatcattctggttaacttatgggactttggggagtcacatttattttaaaacattaaagaaataagtatatttttattatagatgtgacttggaaacccagttgttggtatcatgcctatttgctttgggtatgttattcttgcactaaattccctggactgatttataaaatacttggatcggagagtccatacattctacttcgggcaatgaacaacaactacaaaatatgcatgccgtgggtgctacagaattgcttaggtggtttagctcatctactctactagattaaaagaagacccctaagtaggcctgttttgcctgggctgtgtaaactggtgttttggaaaacctttcccttttgcttgcaggagcaacacaatattggtccttaccacgcatggcctaccggtttgctctaggttagttctcagccctgcgctacctggtgggctgctggttgtcagagctaatgattcacatctacaaattctcaggggctttgtgctttttttttttttttaaaagggaaaccatagtaaaattataactgttcaacctacctacctggaaaatttataattataataatggtgtctttcaccctctttctgatcatttttcgattattttggctctgtttcttttagagcaatgatcttcaacttaggctgcacattagaatcacctggggagctttaaaacctgtcagtgcccagctgcaccctagactacttcaattggaaactccagcaggacccagaaatcagtatttggtaaaacttcccaggtgattctattgccaccaaatccattgttttaaaggaatagatggtaagcttttcttttcttttttttttcttttctttttttgagacaaggtctcactctgtcacccaggctggaatacagtggcacaatcacagctcactgcagccttaccctcctggcctcaaacaatcctcccacctcagcctcccaagtagatgggactacaggtgtgtaccaccacaactgcttactttttgtattttttgtagagacagggtttcaccatgttgcccaggctggtctaaaactcctgggctcaagtgatccacctgttttaacctcccaaagtggtgggattacaggcatgagccactgcgcctggtcagatggtaaagcttttaaaaaaccagattagtgttagtgatggttgcacaatatgaatgtacttaacactactgaactgtatacttacaaatggttaagatggtaaatttttatgttaggtgtactttatcacaatacaaaaatttgggaaaaaacagattaggacactctagatttgtgctgtccaatacagtagccattagccacatgtgactatcaaatgcttgaaatatggctagttcaaattgagataataaatcaagataagtgaaaaatacgcaccagattttgaaggcttattgtgaataaaagaataaaatatttcactagtaatttttatattgcttacatggagacagtattttttatcttttaggataaacaaaatatattaaaaataatttcactttttctttacttttttaatgtggttaccacaatatataaaatgacatatgtggcccccattgtttctactagacagcattgctctaaatttaaaactaaactagcagtcaattaattaaaaaggatgataaggggccgggcacagtggctcacacctgtaatcccagcactttgggaggccgaggtaagtggatcacgaggtcaggagatcgagaccatcctggctaacgcggcgaaaccccgtctctactaaaaatacaaaaaagtagccgggcgcggtggcgggcgcctgtagtcccagctactcgggaggctgaagcaggagaatggcgtgaacccgggaagtggagcttgcggtgagccaagattgcgccactgcactctgcactccagcctgggcgacagagggagactccgtctcaaaaaaaaaaaaaaaaaaaaggatgatgaggttaaaatggtaaatttgatgttatgtgtactttatcacgatataaaaatttgatggctcatgcctgtggtcccagatactcaggaggctaaggcagagcatcacttgagcccaggagttcgaggcttcagtgagctatgatagtgccactgcactctagcctgggtgatagagcaagaccctgtctctaaggaaaaaaaaaaaaaaaaacttttagatttcatttattttacacatatattatcacttggaaaatgagaaaaagtgtcaagtggcttgggaccagagagcctatcctaaacatgaaaacaagtaaaacacacagaagtacttattttttgagtcctcagtggtatgtaagcagctgcagtgcccccattattaggttaatgggacgcaagaacaggtaagtggtaaccctggcccaggacatatgagctgatataatgataccccaaccccatggtaacatcttggctactgaggcatcttggtaaagtcaattcttcatacctccctttccttgcaactagatttggatgatgatacaaaatatccctttacagcttcacttagatttcataagaatggatgggctagcaaaaaaaaccattctgattccttaaagtgaaacctaatagaggagcgagcaccaggcaatttcccattccctagtgggcaatgaccagtaatgtccggcaggatattagatcacctgccctacaggaatacagtcttgtttcccaatggaaaaggacgaaagaccccacgcacttggctgagcaacctcaaggtgatctttgggaagttaagaggctgactctcccctgacttggctctgaagctccaccctttcctaacccagccgcatcactgccaagttcacatcacatccagtctcactctctctcgcatgttgcaggggcttccccttactcagatctagcaatggttttcatgcgtgaaatacagccatggccctgaggctttaggcaacaatctgagaggggagcttaattgctagtagcaactaataactgcttctctacccatagtgttatttttataattgtcctcatcattattaataatagtggggatgaggatgaccaggaaaccttacctagacagttgtttcgacaagacatgaatcacagaaggcacctgcactgtagttactcagggccagttgctctgttttcatttcaaggttgactattttggagatttctttacaccttggtgtatagattgccatcatgggaacctggccaggtttgacatgcgctttaatttgacctcttgttgtttcctagaacaaaggccgagttagatcaagaagccttgatcagtggcaatctggctacagaagcacatttaatcatcctggatatgcaggaaaacattatccaggtgaggaaaacaaacacccaatctgatttgttggccatgaatatgtttactagaataaggacttctttatgcaaaattgtgaaagacataaatgtgatcccatagtaccttttttaaaaaaatgaagttgagaagtttactatttacaacagtgtctaccttataaattccagagataccaaacattcttctggcttctttgacttagggcttacttggagagggttaggtgtttggccagctgaccctcttggttaaatctgtgtgagtatgtaccaagtttataatatggatgttgggtttatcgtttagtatctagaacagtagtggtaagtagaattttttctgatgggtcaactccagttgaatgatggtcactgtctgatatgggagctatgattatgactaggctaggtaaaaagagtgctaaatttgacaaatgatgtcttctttggacttaaatttgttaaggaaagtcatttgtaccatgaatttgccatccctgctgtagaaaaatatagctttgtgaactttgtaccatactaattttatcttctatgtgattatttccacaaattcccaagctgtctaggtaataatgagtttttaattaccctgaaaaatgagttcttacatgtttccattgagaagtcattcattagagtaggtccaggattgcttttagggctagaagaaatatcgttgaaacacagtgaaatcttaattctctaacttttgaattgtctaaaatcaaagtaatcatcatacaaaaataaacacaaaaagtatgtgatatttttgttgactttaatatctttgataacttaaatgcttggtatcacatttaccttatctttatatagcacaatattaggtgccaaatatctatactagcccccaaatatatttgcagttttcaaagaaagctgaaaccttttgttattatccttggtgttgttagtccttctgtaggtgataaacaagcttctatttagaaacattgctgccaccaagcagcccctgttgtactgggaagcccacaattgtgttttgcatcccataaggaaagctatgtcttgtatacaaagaaagaactttccaaaagatgtgacccaggatgagggagatgggccttataccttcatttaggaacccagaattaggtataaatcccaaactcattggaagcattgaaataaagccatttggaaataggtcttcagttcccatggttaatggatgatacccatggtggctcaccaaactcttaagactcaccactggacatggaacatcagcattactgagctaattgtcaggaacatccagttcattggcacagtgcagggattcaatgatgctgttcttccattcccccaggcgagctcggctctggactgtaaagacagcctgctgggaggtgttctgagggtgctggtgaattctctgaactgtgatcagagtaccacctacctgactcactgctttgcaacactccgtgctctcatcgccaaggtaaacttgggatgcttgttttcttcctcttaattaagagtaagattctcatctagcttcatacttctctcttcaggtggaccaaaagtcacagagcatattaagtggcatcacagtaaaggtcttaagtcttcctaggaagaaagcagatgccctgattctgtgggaagccaccatggagaggaaaagcagtggctcccatatttgaagtgtggacctaactctagaagtttaaaatggccattcgctgaaggtctatgacatgagaacagagatcaactgagtgacttagcaatttcactctttctctgtaatacctctgctgagtgagattaaatcctctatgtgacgcccattagtcttacaaaatgtcatgccataaaatgccaggaaggtcagaaatgaatttctcacggcctgaggaatgaggattatcctggggtaacatgcagattatttttccctttatttatttatttatttatttttgagactgagtctcgctctatcgcccaggctggagtgcagtggtaccatctcagctcactgcagcctctgcgccctgggctcaagcgattctcatgcctcagcctcctgagtattgggattataggcgtgtgccaccgcacccagctaatttttgtattattagtagagacagggtttcaccatgttggccaggctggtcttgaactcctgacctcaagtgatccacctgcctcagcctcccaaagcactgggattacaggcgtgagcccccgttcctggcctatttttccctttattgaagatctcaattggtgccttctacatggggtcttttaaatttaaaaagtaaaattcttctgctcatccttctcaggaccattttctctttcttcatcaccagtaatttcccaggaacccaagaaactcaggtttccttccatcatagttgtgatttcaccagtgaatgcgacctggctcacagtgcagttgataacacagctctgacccttttagctggacagttcattattaaatctcaagtctactccattgcttaaatccatcttctgattcacatagctcattatctttatggaataatgcattaactcttctaggctttttgcttgtccaaatggacatttgcatatttcaacggtccagaaagtgtatcaaactgccaagtgatgcctaatggccctttatgtctctcctagtttggagacttactctttgaagaggaggtggaacagtgtttcgacctatgtcaccaagtcctgcaccactgcagcagcagcatggatgtcacccggagccaagcctgtgccaccctttacctcctcatgaggttcagttttggagccaccagtgtaagagttcaaaccagctgagtgacctggaatcagtagagaaaaattgatgtaaagcatcagctgcgaaaaaaaataaggaaattttgcagtattgcagtttacttctgtcctgtgagaaagaaacaattgagtatgtagatagatagcagcttccattttaatttgcatctaaaagtgaattcatcagataaatgcagtggtctctatcagtgtgtttctaaaatagacagccaggggccaggaacgatggctttcacctataatcccagcactttgggaggccgaggtgagtggatcatttgaagtcaggagttcaagactagcctggccagcatggtgaaatcctgtctctactataaatacaaaaatagccagatgtgttggcgcatgcctgtaatccaagctacttgggaggctgaggcaggagaattgcttgaacctgggaggcagatattgcagtgagccgagattgccccatttcactccagcctggacaacagagtgagacttcatttcaaaaaataataataataaaataaaataaccaggtgcagtggctcatgtctgtaatcctagcacttcgggaggccaaggcaggcagatcagatgaggccaggagtccaagactagcctggccaacatggtgaaacccccgtctctacaatacaaaaaattagccgggtgtggtggcacacacgcccgtaatcttagctactggggaggctgaggcacgagaatcgcttgaacccaggaggcagaggttgtagtgagccaagattgtgccactgtattccagcctgagaccctgtctcaaaaaaaaaaaaagaaagaaagaaatggaagagtattttagattaaaagttatcatctgtgggggaaaaaatacaatagacaggttagaattcagaagagtgtttcctgtttctaaattctgactagctagtgccagaatgacctgtggaagaggattttaaatgatcggtgtcatctaacctgagttttattttaatattttatttatttatttattgagacagtgtcttgctctgtcacccaggctggagtgtagtggcactatcagagctcactgcagccttcaactcctgggctcaaatgatcctcctacttcagcctcccatgtagtaactgggattacaggcacgagccaccttacccagctaattttttttgcatttttgttgagacagggtcttgctgcatgcccaggctggtctagaacacctgagctcaagtgatcttccctcctcagccccccaaagtactgagattataggcatgagccatcctgcctagccaagacttgagttttattcaaagctacgaagactttggagttcagctttattatagaacagtcaagtttgctttagtttgtctagattttgataccttctttggaatttccatttgtggccatgttaataagtatgctcaagtgatatataaagataaattggcccatggaaaaaagtcagcctcctccaaatgtattagggatgattatttaaaagacattcctcaggggaccttgaggtagccatgtttttccatgggcctgtaaagaaagaagaaacaaaaccttgttgcttacccggagttcaaaatctcagaaatgctggccacagaagtcccctgatttatttatttagagacagggtctcgctctgtcaccgtggctggagtgcagtggcgagatcttggcccactgcaacctctgcctaccaggtttaagcaattctcctgcctcagcctctcgagtagctggaattacaggtgtccaccaccatgcccagctaatttttgtatttttagtagaggcggggttttgctgtgttgcccaggctgatcttgaactcctgagctcaagtgatccaccctccttggcctcccaaagtgctgggaggctgagccagaagtccctttcttttaataaagtttaaataaagtcccaagaagaaactcttggcacaaaaggatatactgtattcttggacccaactttataagaatcttccagcttgcagcacaaaggcagcccagtcctcaatgaaaatttaaagggagcctgacagatttatgtgagagcaatgtccatttaaaccatttaaacaacaatatgaatgttgtgcaaagtgtagctcccatttcattgagagaagaggaaataattaagacggggcaaaggaaacactgaggagttgtttgtgtctggccatgctgctttcagttatctactgctaagtgtgtcttatttacttcatcttttttttttttttcactgatgcagaattttgcaagagtaaagatgcaagtaaccatgtccctggcatctttggtgggaagagcaccagactttaatgaagagcacctgagaagatccttgaggacaattttggcctattcagaagaggacacagccatgcagatgactccttttcccacccaggtacaccgaagcacataccttgtctcatgcatgagtttgggatctgccaactattgtgtatgtatgtatgtacatatatacacaatttatatataaatatataacatttgcaagtatttattgtccaatatgcatgtgctctcagcactctgagaggttttaaaaagaaatacatccatcactgtccccagtctcaatatgctaacagtctatttggagtgctcagtctcaaaacaattaggaggcagtacaagacaagtgatacataagtgcaaactgtgtggtaaggagctaaatgctatggaaggttagaggaagagaggtcgtgatcaataaacaatctggtggccaggaaagcctgcagggagggatgacactaaaggctggggtaggattccgctaggcaggggaaaagtgagggggaaattgtgagtagttgaaacaatgaattgtttgtatctgtagggatggtaaagggaccagcttgtctggtgaggggtaaggaagggccgagtttgagagagcttgtaaacaaggttgtcctaaggaaatgtgtaaggacagtcatctcttccatgtccattacgatgaccgtggaactctagcctgtcccatttgtcttttaactccagctcctagcctgctctatggtagggtcttaattaagtgagaatgaatgaatgaatgttttcttttattcccttagtctgagaaccctatttccggagtctgttttgccctctcgggcaatgttgcatcctcattctcagaatctttttcctctcctctacatcaaatcgttcctctctcatttcatcttgaccatactcctttagttccatcatttatatagaggtattcaccaacaagaccaatcaaactatgggcagtttaataaaggtcttcagtgccttcacccaatgaaatgactctagtggtagaaattttaggagccctggcaagctggcagaggggaacggggataagacaacattctgtggctgagttacctgccagggtctctagatcaagccatagtctctccctgtttttgtactgcaggctcccctggacctccactgttggttttataattaagaataaatgattacaagaggttctaaaatctctgaagccctgggaagatccaggaggcttctgagacatggaactcaagctgaggtcctaagctgcttcctacttggtataaaaatccctgatattccagagtagagtttagaacttttcaggttacaaataactgaaactggttcaaactaatttaaacaaaaatgttggagatagagatagtatgaggattcaggcagatttctggatctcaagggccaacacacatccaggtctcataaactcctgggctggcgaagatgaaaactacagagtcaggtctagatgactccgccatccctagtctctgctgccctctgatccaacccttcccatggcttccccttgcatttcaatgtaatcctaactcttcacctgggactacaaagctaagattattttgaggcttacactttttgcaggtggaggaacttctctgtaatctgaatagcatcttatatgacacagtgaaaatgagggaatttcaggaagatcctgagatgcttatggatctcatgtacaggtaagctttcctgacacactcaagggacaccatttgggggtcgaggatttgtcactgtggagttcttactaatgtaatgatcacagctaacatggatatagtgatttggatgatagccaaataatatatagaaattaaacattcagagtaggttaattcatatgtaagttttcagaaggatctccctaatttaaagtgaggcataataatgttattaaatataataacattattaaatataataacactatcttctacttaccacagaatcagagaaagaataattaactgttataggaattattttccatatgcttttgttccaattatattcagacatacatatatagttttactttagaaatcattttttacgcgtagtttaaaagttggtcttccagtccttgttcaggagaaattacttacagaggcaaaattgttctgatgcaacatcatacaaagggcagtacttttgtcttctgttttattttgagagaaaggaaagaaaaggcagaaatttgcctgagagccattaaaatagacatcatgttatcaggtattttttccccataaggcttttactaagtactatttcttggaggtcagcacagcttaaacatggaataaaaatagttggactaataaatgttttcttctgtctcgttttctggaaatatagggcaaaatctcaggtggaggggtacagggaactcttggggagaaaaaaagaaaaggtcacacaaagtagaagaacagtgtcattaacccactgtcctcaaaactacttctcactcaatctgtcttcagaattgccaagagttaccaggcatctcctgatctgcggctgacctggctccagaacatggcagagaaacacaccaagaagaagtgctacacggaggctgccatgtgcctggtgcacgccgctgcgttagtggctgagtatctgagcatgctggaggaccacagctacctgcccgtgggcagtgtcagcttccaggtagggtgtgtgcagcttttcccttagagcagtggttctcaactggggcgattttgtcccccagccccagggacatttggcaatgtctagatacatttttggttatcacaactgggatgggtgagtaggtgctactggcatctgactggtagaagccaggatgctgtgaaacattctgcaataggagagctcccctgacaaagaattgtctggccccaaatgtctgtagtgctaaggttgaaaaattccaagttcatacattacatttgcttcttctaattgctttcccatcgtcgttgggttttttttaaattactgtttacaataatggcacctagccattattaatagcactttaggagacatttgcaaacactttcacatgcatggcttcatttgaacctccccgtaaagctgtgaggcaggtaggtagggaaggcggttattattcccacttcgcggatgagagaactgagagagcaagttttctaaggtcacttaaactctttttcaaagacttgtagttgacacagtatactgacattgtgaaagtttggaaaacattggataaatgattttcctcctggcccattcatttgattccactcttcaactttataggggcccactctccaatccaaaaatcaagaaagaatcaaattgacctgagaagggagacaaaaggctgaatcagtaccttcttaggataagctgaaaattacccacatttggcaaagggaaattgtctgccagacctaaaagctggctcggatggggatgctcagtggccacttaaagtgttcttactgaatagtttaatagtctttagagagagagaaaataaaaaagcacaatgttgggtactttttttgtaagagacatagtttgtagagatgaccatccctgaaaccatgaacaatatagctacagtaatagagtgtttttcaagccagactcacgaagtcatttacaagggtttgtattattcttgtttgaatttacatggctgattttatgaaaagctttgttcttgttattgttcttcaacacaattttgtgatgttgtatgaaccagaaagaaagaacaattcaaagtagcttccccaggcttagagaataagtcactgaaactatgctggtgcagccaagagcttctggttttccagaacacagcaaagctgggtattgcctcctatgaataactcctcctttcttatggtcctcaagaacaaaaatagtcattctgtgatttcatgcttggcaaatgaattttcttcttaattcagaaatgtttgttataaaagctgataattaaatctcatccaaaagcataaaaataacacctgatttcaaatcacatagaagtgtacaagaaagttataaaagttattttagatgtatttgcttcttttctcaaatttattttgaccatgtgatactatcaaaaataaatattatagtactactctttcaattcccaggaaattgtaaggtttagcacttcatattgtttcatttactaaattattttatacttcttttattccttttcccatgactatattttattttatatttatcacttaaatatcaattgcatttcattattgacttttatatttagtaagccttactgttctaattttacctagaattcagttgatttgctaataatgacatgccaaagtgaatcattattacacaatcaacagaaatattccacattattccgacatgggggcatacagctctatctgttcacatatatttatccattgattccttcttttagagaatatttattgaatacttattctgtcctcatgaacgttacattctaaccagagagacgtaatataactaattattccaatctttgttcagttataattatgagaaatactgttataaagaggcacaagatattgtgagcatttatggtccaggccctgtgggtcagggaagggtgaagaaggtgaaaaggaaggcagaagaaactgaagtgtgagggcttcttgatgtagaggaggcaatgagttaggtgttgtcagctacagaagagaagccaaattatattaatgtgtatgagtgaattcttacttctctcaaatgggacataccaaatcaatttggaaatgtagctggcaagtgaaaggacacccaacccagactgacagaaggtaaaaatggaatttatcagcccgtctgaggaatgtgagcctggagtagcacctgccatactggacctaggggcccaaacaatgtcagcagagctcactgtcatcaccacttcccatctctgccatctgttgtgtcagcttcattcttcacaggcttcccacaccacagtttaggtttacatctctaggttcaagtctaggagagaagagagatgcctcctttctagcagttgcagagaaagcctcagtgcatcttactgatcctgtctgaacatctgatcctgtgctcatccctgaaccagccatactggccagagaaatggagtgctctgatttactgaccccgggtcatgggtccacacctggaattatgggtgatttcttcccctaaatcaggatgccttactttatagaaggaggaaagaattctagacagcattaacaacagatgtccagtgttgattttgcaaatgctctgtgctttaattttcaaccttgttctgctccaatgaaatagagcttttggaaaagatttataaactagagataaataaatatgtgcaaggaaaataactttgaggtcactgaattccaggaaactgagatcactgaaattctgtgtcccagagtgcaatatttatttcacaactgtagatacggacacattcttagatactgctgttacttgtacctccctgatcctgaagccaagaaagtctgcagaatccttttcctctgactacagctaatgaggctacatagcttcaaatctgttcctctaatgtggaaaattgcatacattctaatagtattagtatcttgggttattaaatgctttcaactgaatttcttggatcttctgttgtcacagaaacatcataatacatagggcaggtttggaagaaagactggccacaaaggctttgagagcctcctcctatattcctaaaactacgttacagtattgcatgtgaagagatagggctatctatgacaactatgtcctgactgattgctaaggttgattcacatgatcttgctaaccaggccagaaggcagacagcttttagttcacaagccaactctgatcagttagtagtggctgactggagaactatgcttaagaatttcgagactatgtccaagctctggggaaaaagtgctacagttgattagttatgcctgccatgattacagcaataggaaggagtggcatgtgtgccacctgtttgtaatccctaaactgggaaggtttcccatttcttctgtttttcatatgcatttcttccatagctgtgagctaggaagaaaatgattcttgacctgtcacatattcactgccagggccagtgctagggtgaagaggcactcaccctcagggtcgagcgggtacaagatcagtacttccatggccctaaaagcgagtacctctctaaattttgtcttgggtttctcatttggttcaccccaaccatggtctctgcatgctctgctagaggctctaaacgcaatagtttatgtaaaggaaacaaatgcatggaaacaaaatgttcaggaagaacaaaaacacacacacagtaactgctgcaatgccatgaaaacttccttaatgaagacagcctcgcttgctgttgtcgtatgtcatggctgtttatctgagtcaactccagagtagcaacatacttcagaaaaacaccactgtaagtcagaggtccactcggtgaaacagggagcctagttaatgttaattgggtctttgccttttgaaaaccaggacaccagccctatgtcccttagggttgtttcactaaagtaactcagctgttgtgacattgaggtaagtgtcctttatacaaaatctcctaatggttaaaaagaaaaacgtgaggtttgaagaccagttgctcagtgcgcctcttctaaatgaatggcagacagatactctcggggtagaattacagacctagtttagtcacggtcttggtaaggatctgcacaccagcttcctcgtttccccattcggggttcctgtggtctcttactagtctggtcgccctgttctccaggcttatactgtggtctctttcagaatatttcttccaatgtgctggaggagtctgtggtctctgaggacaccctgtcacctgacgaggatggggtgtgcgcaggccagtacttcaccgagagtggcctggtaggcctcctggagcaggccgcggagctcttcagcacggtcagtgcccagagggcatcccggggcctggcctcccatactccagctggacttggggtgctgggaacacctggtcttaatggcccagtcagccccacttcccgaggacacgtgccagggtgtgcggggcaggggatgggcccggggaggactttgatgtatgcaaattgcatgagcttcccaagggagctgagataacctttcatcacagtgccgatctgagcttcactgtatgctcattggttgggcagcagtttcacagtattatttctatttaataggggtggaactaagccacagagaggtgaaatggcctgcccagggttacacaataaatgatgaggcatgttttcactccctcgtttttcctctcagagagaaaaaaattagggaggaaccactgggaggagagaggaggaatacacagacagtgtcttccctcctagccactgtgcagtctgaaggaccatcacagaccaggaccagcttacagaaatgtgggcacagaaaccactgagactcctctggttaacgtaatctggatctaaacactcctagtatatatactagaaaaatatatagagagatgaagtcattgagattcagggcaaagaggaaacactcttgtctattttcttttctttttttgagacagagtctagctctgtcgcccaggctggaatgcagtggtgcaatcatggctcactgcagcctctacctccagggttcaagcaactctcctgcctcagcctcatgagtagctgggattacaggtgtgcaccaccacactcggccaattttttgtatttttagaggagacaggatttcaccctgttggccaggctggtctcaaactcctggcctcaagtgatctgcccatcttggcctcccaaagtgctggaactacaggtgtgagccaccacgcccaacttgttttcattttaataatctccctcctcctttacattttaagccaagaaagtattcagtactttactatatttagctgacccaattttgttttcatctatactatactcatccttattttccagtttttatttccaagtttcctctctacaattttatttattttaattattgttttaactgtcttctctctattcttgctttccttttcaagattcagaaaatgtctaatatactctcatttttcctcaaactcaacaaaatgaattagaatcctactaactctttggaggcatacatttagcatctggctagaggaggacctctgatgaaatttaaatatactaaaactgcctttctgaattgctgttagtccctgctaccaaacttctctcctgttttttcttttcgttttgttttgtttttgtttttgtttttgaggcagcgtcttgccttgtcacccaggctggagtgcagtgatgcagccttggctcactacagccttgacctcctgggctcagcctcccacctcaaccgcccaagtagctgaggctacaggagcatgctaccacacctggctgattttttaatttttttgcagagatggggtctccctatggtgtctaggatgatctgaacttctgggttcaagtgatcctcctgcctcagcctcccaaagtgctgggattacaggcatgagccactgcactcagccagtatttttttttcccccgaaagctcttctccttacttatcgccatacaggactacttagcgaggtgtctagttcagtttgaaggctaccactgtcccaaaagtgctcagataccccttcttgccctgtgaaatactgtgatacaacaataaattcactctccagcacattgtttggacaatgacctctggttgctcttcttaagtttccagtggattaaattctctctgatgctcttctcctctttccaagggaggcttatatgagacagttaatgaggtctacaagctggtcatccccatcctagaagcgcatcgagaattccggaagctgacactcactcacagcaagctgcagagagccttcgacagcatcgttaacaaggtagccggggagcctggctggcaggtcttgttacctggtggcaggcgaccctgtcctacagatgcttagccatccttcctctccagggagtgatttatctttagcacattgcttttgctctcacctgtcaaacagaaaagggctgaaattcttctaacagaggaccaaaattccatatgtgaaaacatacagcttaaattactttataaccaggaaatgtgagaaatttttaagtgtaattaaaagaagtcccagaaatctttcatgggattccttttgttgttatttctgaagtttattccataagcattaaatttttttaaggagtaatttctgtttacatcagccataggagtaaaatgctttgttaacacaatgagagacccctgccctttgcaactcagtggctcctcaggatgacataactaaggagagctttttatattttgttcctcaggatcataagagaatgtttggaacctacttccgagttggtttctttggatccaaatttggggatttggatgaacaggagtttgtctacaaagagcctgcaattaccaagcttcctgagatctcacatagactagaggtaagaaaagtgattctgtgcgcctgacctggtacactttacaaaaacaagttagagtgggtcatcaccaaaaataaacaaataaagagttatggattcatcattgatctctacataaagttttcccctttgcatttataaaaggcaaagtagaaaggtattaggtgagatcatgaggtgatgtaatattttgatagtttttccctaatactctgtgtatgcttttcacagtttggaattttatatggtgaatatttattttgaagtctgtgcaaaattcaatcaaggtcatgtgctttcttatcaccctttccaaatattagtagtttatactagtagatagagagtagtagagtttttcaacatgaagtttagcatcttgactttgaagtaatctagccaaatgactgaatcacccctagataatggtgaggccatcctttaggtatcactggatggcacctggggtccttctgatgtggagctactcagctgtggccagcccggctccaacctgccagtgagtgacatttggtccataatacaacagaaaagtgtagcatgttgttagaagcaaagctgaaagcatggagaaaaagagaaacagcctagagaaaggtcaggacaaaagaaacacaggttataagggccaaacactaagaactcagtcaaaggtgcctccccgatgggatttggatgaacaggaatttgtttacaaagagcctgcaattaccaagcaggactggggtcctttgaactgctcacaattaaccaaagattcactccttaggctttcattgctttgaatttgtgccctcctatgagtgtaaaacttaaaacatttgtgttgcctaatggcttcgtacactctccatccatgccaaaaaagacaagagggtttatccttacttgactcaaagaagccattgcccagggtggctgggtgagttgccccaaaattgtttagcacatgagaaaaagagctagcaattgaccccagtccacttggttccctatattgtttcccctacttagaattagaggtatatattttatcttcttgtgcactgtgatttgccacaatatgggaaggctggtgacttccaagttcccagggtacagaaggcgagaagtaaagagtgtgataccccaggagatacctcagcaaatataatgatgttagctgaattagaggccaagcatacatcttatagggaagcatataccagttgacagtgctatttttatttttgtcttaggaaatgctgaactttgctcattagctcagaggaactctcaataatcagtgaacatcattctaccttgcacttgctccaaacttatttcacttccaagaagacaaagagttgcattatgttaaaataacctttataaactgttggttcttcttacctaggcattttatggtcaatgttttggtgcagaatttgtggaagtgattaaagactccactcctgtggacaaaaccaagttggatcctaacaaggtatacaaaaatttacaaaaactaaccatcaagctctaaatcccttcgttctctacccaagaatacctaatgatctcatctatctggactctccaagtcacttaaatgcagtcaaaccttttcgtctagagttcaactactaattggtcagatcttaaagaaaatatagtcaaaggcaggaatcataataggagctaccacttattaagcaccaactgtgtacctggaactgcattaggccctctacatacatcattttatttcatcctgcaacgacccctggaagtagattttgtcattcctattttagagatgagaaaactgagacatggaagagtcaagcaagtttcaaggtcatgcaagcagcagagccagtactcagacttgaggtctgttgcttctgaacccctactcttcagcactgctctttactgcctttttataaaacctttaaactctccatttcaaactcgacaacacttagtggcttccttctttaggctgcaagtattccttccatccaagtccgggatcactgtgctgttgggggaatggtaaaaacggcttgggtttgggtttcctcactttcacaagagggtatgttccatttcaccccaaaatgggtgtacagttctgatgctaacacgtggaggtggtatcagctcccacagggtaaaggctcagtcctcctcaagactgccctgacttcagatgccagcttcaagagggacccccaggccagccacgcttctgatcagccagctacaaatttgggagtttctataacctgttagcttgaaaataggagaaaacaaagcaaataataataataataataataataataatttgggagtttctatgatacctgttagattaaataattcactacaatgactcacagaattccaaaaagtactctggttactatcagagtattatgataaagggtgaacatctttttgtgcctttatttatggcttcctggctcatcagtgtgttctccaaccaggaagctccgccaagtctcagtgtccagagattttgttggggtttcattatgtaggcaaattgaatacagtctccagcccctctcctgtctccagaggtcatccagttcctaccctgtaatcacagaattggtctttttggtggccacttggcatcctgaagctatccaggggcccagcatgagtcacctcattagcatcacaaagacacccatcactgaggaaattctaagtgtttctaaagctctgtgctaggaaatggagacaaagaccagacatattctttattataccacaagctgatgctgcccactcagcccaactcacatgtccatgaatgagctttctaagttactggaaatagtgcaagtgcaaggtatcattaagggccctgggacagaggaccattcaccatctagcaaacctataaaatgaaaggtccaaactcccagttccatcttccaggatatgaagaagataatggaagaggggaagaattggccaaattgaagagtttgtttttctacatttttcagaatgctttctcacttaagacacattccctagcctcggcttgaaagcagtggctgtggtaagagtttaactaatcttcagacacacatgtctgggagatggagttggccgtgtgcccacagtgatctgtacatagcacaagctgtgtaaaatgtgacctccctcagccaaggtgcccttttcccctcttttaaaattcccagggtaggttgtgagagtttggaatgagagtctgaacccagagttacaaccagatttcattatactaagtcgtgatttacagtctgaggtcagtgaccccactcatccctttcagtgggtgagtgtcccagcatctgaactcatggtcactttttttcctaagagattgtcgtctttaatgagtacttattcgctctgtgtttgagggtggaggtgatgtgagtgtgtgtttaaatgaggcctaggcagtaaaattcagttttggtgtttagttctatgagttttgacaaacacatgtgactaccttcataaccaagatatagaacagatccaccactccaaaatacttcccgtgcccattggtagtccatgttgcaatagttccttcctttccgttgctgagtagtattctgttgtgtgactacctcaccatttgcttgttaattccccactggagtgacatttgggttgtttctagtctttgttatgaataaagttgctggagacatttgtgtacaggtttttgtatggacataagctttcatttctctcctgtacacacataggagtggggttgctgggtccaatggtagtgcagtttaactgcataagagaccgccagcttcttctgcaaagtagctgtgcattttgcattcccaccctctgtgtatgacagctctagctgatctccatccttgccagcacttgatattgttagttttctttagttcggccattcatgcttcctcataactgtgaggtagtcattgtcattctgtaaaggaaagtttgtctctttggaatagcagtttgcaaactctcataccaaggcttccactgtggatcagtttgctctgctaggaaggtgcggccggtggccctcactctccccacaggcacattcccctctccctccttgcagccccttctgtccttgggggtggagaggaggaacttctgctggccacattctcccctgcatctgtagcttttctgcactgggcagggcggtgccggcacgccgtgttcctgcatgcccctccattgcgtcagggatggccgtttgcagaatagctcatcttctccctccgtgccttttcccccttaggcctacatacagatcacttttgtggagccctactttgatgagtatgagatgaaagacagggtcacatactttgagaagaatttcaacctccggaggttcatgtacaccaccccgttcaccctggaggggcggcctcggggagagctgcatgagcagtacagaaggaacacagtcctgaccactatgcacgccttcccctacatcaagaccaggatcagcgtcatccagaaggaggaggtaatgcacccaagggattggccaccactggatgagtgggctgggtggcctcccaggaggacccacaaacctctttcacagtggattggactgaaaacaaggagggatgcacttgaaatatgattatatggttgtcctttcactctcatagtgccagaaaatcccatttaggcagctacatattttatagcactattgtatattaaatatttaatattttaaagttatatctttagtataagtgtgtttatgtatttaattataatatttaatatatatttcaattataaacttgtacaacagatatatttaccttttaaatattttatataaaatttttctatatttcaaagcttagaggtgattcaagcatagtcgtgctgttaattattggagacgggacctgcacgtgggcagccccagtgaggcggtggtgtgctgtgggaaagggccgtgtaaggtagacaagttcactgactagcttctagtcctagcttcctcctgtgattttaaacaagctacgtaccttcagtttcttcatctatgcattagcaggaaagacctctaagtacagtacaagattatactcattttattaataaaaggactggtcaagaaggtctctcaaaccacagaattgttcaaaattctacacaccataaacaacttattattctttaaaacacatatatatacacttatttgtcgtcctttttatgcagggccacagacttctctgtgactgtgggtttgctgatcacaattcagcattttcttttataaaccacacccgtagtgctttgtccatgattttcagttttgctttgtgtaagcagagtgagagcttaaagatccttgttaaacaatttgagagcagaagccttctggatgtttatgatgtttttctccccgagactttgacagcagtcttgtgcacacctaatatgacaggaatttttatagcaactcactttcataatatcttgtccaaccatttggcttggttttcatagaaagaaatctttttctttccacacccatggttcatcagtttctccattatctaattagattgggtcattaaaataacaagtataacaggcataatcaagttggtgaacaaacacagatgaattgtggtgaatatatacctcatcaggcagaagcagaaatagctgagctaactggagagtcatccagcaggtagtgttcagctgggtaaccacatcagggtgtggctttcacagaagctgaagaaagcctgaagcagtgactcagtcgggaggaggtgggtttagaagccatctgctgtacttcctatacttcttggtttggacttttgaacactgagacattctaggcataacacagatataaactcatggtgcccaaaagcatttcaaaaccttttcttttcttcattcctgccttcctttcctttccttcctttcctttcgttcttcctttttttctgtgtctctgtctctctttctctctttttcatttttgagacaggatcttcctctgttgccctagagtgcagtggcatgaacatggctcactgcagcctcgacctcctgggctcgagcaattttcctacctcagcctcctgtgtagctgggactacaggcttgtgccaccatgcccagctaattaaaaatacagagagatatatattttgtaagagacaggggtcttactttgttgcccagtctggtctcaaactgttggcctcaaacgatcctcctacctcagcctcccaaggtgctgggattacaagtgtgagccactgcaccagcctgaagttttcttggccttccttcgttccccaacaacctcaacaacagttctcagctgtttgctagggctgtagaacaaagttccatagactgggtggcttaaacaactgaaatttactgtctgcacaattctagaggctagaagtttgaaatcaaggtgccagcactgttggtgccttctgagggctgtgaggaaagggtctgttccaggcctctctccctgacctgtggacagccctcttctccctgtgtctcttcacatcatcttccctctgtgttcgtgtccagatttcctcttctcgtaaggacaccagtcatattggactagggcttaccctgctggcctcattttaacttgattgcctctgtaaagaccctatctccaaagaaggtcacattctgaggtactgaaggttaggacttcgacatatacattttgggggaacacaattcaacctataaaattcagaaaagactctaccccaaaccagcagaacttagcaaatagattgattgacccttaaaagaattccatttactggaaattcaccctcagttggagaaggcacaggtgatatcaaaagcctgtgttatgatgggggagaaaatcttgagtgctgtgcttctactacagctttctgcattgtaagttgagtaacatgaggctgtgtgcggtggctcttgcctgtaatcccagcactttgggaggccgaggcagggggattgcctaaggttgggagtttgagaccagcctggccaacatagagaaaccgcatctctactaaaaatacaaaattatctgggtgtggtggtgcatgcctgtaatcccagctacttgggaggctgaggcaggagaattgcttgaacccgggaggcggagattgcagtgagccaagatcatgccattgcactccagcctagacaacaagagcaaaactccatctcaaataaataaataaataaataagtaagttgagtaacttgctcagtaataggaaaaggcacctgacagggtagaaaaaacatggactttgaagatagacatacttgtgatcgaattatgacctcctcccttactacctgtggcattctgtggaacttaaccttacaaatccccctttgactgtaaaatggagagtataaagaggttgttgagaggaataaatgctaaatgtatgtaaagttcctggaacataaggaatcaagaaatgttaggcccatctttctttttaacctgttaagagtattttaaattactctgaaagtctttccctagctgcctcttcaaattcaggtggcctctctgtcatagctccaggcttgtccatagcttatgagaccagacagtgacttccctatgtttacgtctcatgttcagtttgttttgacaccgattgaagttgccattgaagacatgaagaagaagaccctgcagttagcagttgccattaaccaggagccgcctgatgcaaagatgcttcagatggtgctgcaaggctctgtgggagctactgtaaatcaggtaagcaaaaccagaggtggcagctcctctggttcttattatttaggttgtcattatacgtctgcacccttcttccttggggttgatgaggactttgatccatagacaaacacagaaatgttcctacacttaacctgaacacctgtaaggtttagaagacttttaggaaacctcttccctttcatgtaacaaccccaggtaaaaaagaaatcctagagatgagtggaccaggctttaaggagtaccactttctcagaggagtctccacttcggggccagacctgacaatatgatgcaaatctggagtcatgttgaagaatgcttagtcatgaccaattcacgcagagtaattgcagggcttgagactcacctacaaatgcctataggagagaaggaaaaggatctagaacatccaactcttggctcagtcagcagatgaacccagcatgccaaggaccttgacaaccaggaatgacctgggacctgacttcttaggctacttcagacaagactagatcttcctatcagacttcttagaacgctgactcccaagttcagcatggtgctcaagcagtctcagatgaagggaggtaccagcctaatacctctgtccagtgggcctccttaattcaaatctagatctgttcttgtccacacttccacggcagttattcagtgagcatcatgagtcttttctcattcagcgtaattggatttccccacaaaagttctgagtgtacttgacatcaagggagcagaaacagagaagagaaatgcctattacattcccaagatcaggaaaaaaaaatgaggaaacgtttgcctttgtaagtgccaatcctttgataaaatggaagactttccaagcccacaaccatggtctatctgtacacgatggatatctctgactcaatccagcagttatgcaaaatgatgtttgccatgaaggcaactagataagtgaacaaaaatgaatagatcaaggcaatcctgatttttagaaaagcaactcaaagcacataccatttgatgtagttgtattacacttatatatgaatgaaaatctattattagtagtatttgattgataaaataatattcggcgccaggctcagtggctcatgcctataatcccagcactgtgggaggccgaggtgggtgaatcacttgaggtcaggagtttcagaccagcctggccaacatggtgaaaccccatctctgctaaaaatacaaaaattagccagtgtggtggcaggcgcttgtagtcccagtacttgggaggctgaggcaggagaatcccttgaacccgggaggtggaggttgtagtgagctgagattatgccactgcgctccagcctgagtgacagagtaagactctgtctcaaaaacaacaataaaaaagaaaataaatttgggctgtgtatggtgcgcacgcctgtaatcccagcaatttgggaggctgaggtgggtggatcccttgaggccaggagttcaagaccagcctgggcaatgtggcaaaatcccatcactacaaaaaaatacaaaaatagccaggtatagtggcacacacctgtagtctcagctacttgggaggctgacatgggaggatcacttgagcctgggaagtggaggctgcagtgagcagagatcatgccactgctctctagcctgggtgatagagcgagaccctgtctaaaaaacaaaaacaaaacacacacacacagggaaaatacatttatacttctgagtgttcctctaaaacttcagattcctcctaagaaatcaaaatttcctgagatgtccaagaccttccttatttttttttgtttatttcaaaccaactacaaaattaaatgttcaaactaagaagtcactccaatattttctcccaagcaatttaatttccttcatatatgtatgaatatattcatatatatgtgtgtgtatatatatatacatatatatgcatatacatatacatatgcatatacatatatatgtatgtgtatatatatatgtgtgtgtgtgtatatatatatatatatatatatttttttttttttttttttttttttcccaccagggaccactggaagtagcccaagtgtttttggctgaaattcctgctgatccaaaactctatcgacatcacaacaagttgaggttatgctttaaggaattcatcatgaggtaagaaggaaaatggctgggaatttcagtagagcagtggttctcaaagtgcaatcttagaccagcagcttcagcatcacctgagaacttgctagaaagacaaagtctcaggcaccctccagacctgctgaattggaatctctggaggtgtggctcagcaatgtgcagtttaacccgccctccaggtgatcctgatgcacactgaagtttgaggaccactgcagcagagcaacactacttgaactactaatgagtaactaacacgtcaactatgaaacgcttttgtggctagcatcccgtgtgcctcacaatcacttgttgtaaaacaagtatcatcatcttcctcattttacaaaagaggaatcagaggttcagagagaggagataattttacttaaggtcacacagacagttggcagcagagatgagctcaaaccaggtcttctgaatccaaatagtccacatgtccatcaatgtgctgatattccactgatgcactagagtcccagaggttctttgcattggcagtcattgtaatgttacaaatcttataatatcttatttttagaaacttaaaaacatacactgcctcaaattgagagaggcaagttctaaaaccaggcttttcaaaggtattatcctgtgacagttccccatgtcagacaagtctcatctctgttccttaattctgcagtggagctggcttcaagagcagtcagttaggaactgggtctttggtcaaagccttgtaatttattgcaatacagacagatatattgggtctcctatggtcctaaaaatatgagtatgaaggatgtgatggcatttcacctataagagaaaaggacttcagaaaaatgtgtagcaatatttctttctattcaaaaccttagagaagaatattaagtataagaatatcttcacttggcagatggggataaaggagactaaaagtttgctaaattcagtgaaaactcatcaaaatgctagcatttgtgaggttagagatatctcctccttcacaggcttttgcgagaggtccgcaattttgctgcatatacaggagacacactgtgccctgcagtgaatcacagccgcttggtaataggatgtttgtgtggctttgcgtgtttgtatttgtgcatgtgtgtgaacatactcacagattatcttgattaatgttttgatatttgaattgtttcctgtatttgacaacaattctgacagaaaaactagttgttgttgttgttttttcagtacataatacgtatcttttaaaaggctagaaaaatatttggggaattattttattattttattttattttgagacaaggtctcactctgttgcccaggctggagtacagtggcataatctcagctcactgcaacctccacttcccaggctcaagagattctcctccctgagcctcccaagtagctgggactacagacgtgtgccaccacatctggctaatttttgtatttttggtagaaatggggtttcaccatgttggccaggctgatcttgaactcctgacctcaaatgatccacctgccttggtctcccaaagtgctgggattacaggcatataccaccgtgcccggccctattttttattttttgtggagacagggtctcactatgccgtctaggctggtcttgaattcctgggctcagagattgggggcttaaaaaaattttttttcatatatttttatttaaaattcattatggttgaatgcttccaaagttgactatgccccaggacctctaaaaggacctatgaaatgtttgaagagcactcactatattccaggcatgatattagttatgggactacagagatctggcttgttcctctgttcttaatgacaggacatagccctgcatggctgaataatagaatgcagcatatgcacagaactttaagaatgactaactacaggactataaagatcagaaaagagaaatcagtttcaggctggagcatttgtgggaggcgttatggaaaaacaccacttaaatcttgtcttgactatatacgtggaagaaaggcgctagtggggaagagggagccaggacagtggccctgcctgatccaaggtatcactttcagctgctttagttacccatggtttgaaagtattacttacaatatgatattcagagagagagagagagaccacattcacataacttttatttcagtatattgctgtaattgttgttaatctcttactctatctaatttgtaaattaagctttatcataggtatgtatgtataggaaaaaaacataatatatgtagggttcggtaccatccgcagtttcaggcatcccctgggggtcttggaacctatccccgagaatgaggaggactgagtaccactgagtggaccagcaggaccacgagactctgtcaggaatgcctgtgatgcaccgggttcctctaagtccagctggagcagcgtgttctcatgagcatgctaggacaaggaggaaagattggaaatatgataatatcagtaaatgaggctctgaatacaatttaaatgtttaagaaaacttgtcaggagagtgattttcatttacttcagtttgcctcaattttttctactagttataaatcttgcaatccagtatctcacgggtatgatcctttccatgacaccacctaggtaaaatgtacttacaaaatccctactaaacatgcgtttctcattagctcccagccccaggaaaagttactccaaaaagaaccagtgcccagtaaaactagtcccaggcaagagatacaagaggaaatggactttcctaggggtcgctcctttaacaaagtcattagagtttcaataatgaggctatcattctccccagatggcctacagaaatgttggattttcaaaatcaaattcaccattttaaagttgttctcctacccttttaatggtgattccacatgggaaccagtcccacctttctccccactggctgggctgctgcattgttctaggaggccaggagactgtccatgcttcccagacttcactgttcttacacgtcacctgaggatttgtcaaaatgcagattttggcctgatgcagtggctccgcctctaatcccagcactttgggaggctgaggtggaaggactgcttgagcccaggagttcaggaccagcctgggcaacatggcgaaactctgtctctttaaaaaaatacaaaaaaatacaaaaatttagccaagcgtggtagtggtgtgtgcctgtagtcccagctactcgagaggctgaggtgcgaggatagcttgagcccgaggaggtcaaggctgcaatgagccatgatcgtgccactgcactccagcctgggtgacagagaaagaccctgtctcaaaaaaagaaaaagaaaaatgcagattctgattcagtaggtctggggttggtcctgaagcactgcatttctaacaggcccccaggtgatgctgctgctgctacactggaccaaactttgagtggagagcctgcaaagattgcttaatttcctccctttcacatttctccctattacctctccctccttccctgagggcttaatctcttaggccatccttatcatcatttaccacttttgccgtctgcttcctcccaaaaaataaataaataaataaataataaaataaaattttaatggcaaaaaaagaagttgtaaatctcaataaaattatgtgagaacaaaaaaaaaagcaaacatgctcaaactgctgcaccttgaaccaactatagacgtcagttcatccattcattcagcagttattgagctcctactttgtgccaggcactgtgctacatatgtggaaggatgaagtcccaatatcagtaggacaaggctacagacaaaacagtactgctgctcattattcatctctatgtgcaaacacaacagatggcctgccctccacttcattctacagagatcagaagtcgtgggtgagagtgtgctgatggtgcacaactgtgtaaattactaaaactcatcaaactctaaacataaaatgggtgaatgttacggtatgtaaatcataccctgaatacagatagtagatgaggttcctctgttgcttaattgcttctcaagtccaatctggaagttacagcttttaatgaatagagtaactattttttcacgttgtttgtgctgtgtattttctcctccactctgctaacagacagcagaggtgacgcagaagtggaaaatatttggggcttgaacagctctcaggtttcccctttagtaagctccagcttctcagcagacttgggctgtagatcgataagcccagatttccaaggtgaccataaatgagtctctgttgctgagagctaatagcggaaacatttgcttgccaggtccactgcgtctagtgccaccacggggcagcgacctttctgactcagctgtagtggaagcagaaacagccataaagaatcctggcagcctgatttgctgcagccagtactcatccagccagtcctgcaactcttcaaactgttaccaagctgggacctcaatcagcttctgtcttttcctgcaataataaaaaacatctcgggttcagaagccaagacaagaagatagagagatacaatcttctatcttcctcttctgctcccccaaacaccccgaccatttagatttttaaattttcttctttatacttatctggactttctcattcttataaagactaagtgatgttaaatttgtttttaatttaaataaaagatagtagtactcactggcaccagttacagcttgcctttaagagaagtagtttcagatacaccctgaaagggttctgcagcatatatgtggtcataggctcagaaaacaggctgttgagtggtggcgtttttaaactggagttggggtctatgaagaggaaggagaaggaatttgtccgagtagccaaaggacaaccaaatgtgtagagtgtaggtggaaaaagaagcagtagttttaacttgagaccaaggccatatgcctggcttatagctggaaatggggaaatggctttcctaggcagtatatgtggcgttggggttgggaatatgggcactcaagccagattgcctgagttcagatcccattctgcctcaactagatgtgtgaccctgagaagttacctaccctcggtttccccagatgtaaaatcggaataataattgtacctctcccttgcagttagtgacagaataaaatgagttaatacatggaacttagaataagacttcatacatactaagggatcagtaagtgtaacattgttcagtggggcaaataggggactgatggatttgagtgggaaatagagaattaatctgacttaaatacggagattgtctatccatgatttgtctgtctctataaagtttgaatcataagacacagtgatgctgatgagacattggcctgggagcagcaggattctgggtttatatccagctgtgctgtcccacaggtatgtgactggacagggcacttcacctctttgcatgttagtttcatcaactatgaaataaagagactagaatacagcatctctaatagtttatcattctcatattgtacaaatagttcatttacttagcctgggtctgtcaggcataataacgctaccatgtgctctggcttcagctgtgtgcagggactcttctgaacatttgatatgtttcaactaatttaatctttacattaatttatgaggtaggctcttatcacccacacatcacagatgaagaaactatgacatgaagaggttaagtagcttgtttaaggttgcaaagccagtaagcagcaaagcgggattcagagttgagcactctggctccagagtccatcctcttaattgccatgctgagctgttccctctagtgactatattcagttgctagtaacagaaggaagagtagcttaaataagaaatttatttttctctcacattaaataagattggaggtagtcgatgtagagctgtgtagtggcctcataaagtcatcagagaccctggttcttttccaatcctttgccatgccatcctggttctagtgtacccattctcgtggtcatgatatggttgctagggctccagccatcatgaccacatctaggcaagtcaggagtagaaatgaggaaacagcaaaaagatgtgcccatttcccagtgccttcacctatattatcagcgatccctacctgcatgggaggctaggaagtgtaagttttcaggtggtcacactgcctggagttctgccagtagggaagaaagaatggatattgagaaaacaactaacgaatgtttgtctgccacactgaggaacccatgtatgggctgtgctgaaaaaggggggccaaggctgggtacagtggctacgcctgtaatcccagtactttgggaggctgaggtgggcggatcacttgagctcacaagttcgagaccagcctgggcaacatggcaaaacctcgtctttacaaaaaatacaaaaaaaattaaccgggtgtagtggcgtgcctgtagttccaactgctcgggaagctgaggtgggaggatcacttgagcccaggaggcagaggttgcagtgagctgagatcatgccactgccttccaccctgcatgacagaatgagatcctctctctaaaaatagagggggtaccaagagatgcagggggggtgagggcagcatgactactctctctgtaggagaccttaactctataaatggaggccccaaaatgttactgccatcaaaagccaggaatccttttctggaggcgtaacttcctgccctttctaatccctatcaatctggtttctgtagaactgtgactgctagaaaaccccaggcatatttgttctaagaaaatacttgtgttcggtgaatttaccaacaaagggagcatcagaggatgtgagggaagtctggaatggttgtatcactaagtgagagcagcacagatgtttgtggacctattgagaatgttacagataagaccatttttgaaaagttgtttgcagtgtcattttatgatcttgtgtacattttccaagcgatgtggctattctctaggagggatagtagaaattatttcaattttaatcaaataacctagagaatataacccaaatgactgaaaggaagaaatgtagaaaaagtatataaaataattttttgcattataaaagtttaaagacataaagtaatattactacataaaatctaagttttttactccagctattaatatgtttttctttataaaacatcacatttattaattgctgtgtaacaaactacctcacaatttagtggcttaaaagaaaatttaattattatgcatgtggtacataataatttttgctttcctcatttctactcctgatacttgcctatgatgtggtcatgatggctggggccctagcgaggtgtattgtggccatgagaatggttttgctgcaacttggggttggctgggctcagctaagcagtttttgcctggagtctctcagttgcactgagacagtgactaggacttgaattacctgaatgcttcctcactcatgtctggtgtctgggctgagaatactcaaacagcaggggctcctcctctctctaactctccttctctccacatggtctctcctgcatgacagctttagggtaactagacttgtcacaggatggttcagaactcttatagtacagaacgagagagagacagaggccatattaccttttattagccagtcacacagtaccacctccaccacatcctattcagtgtggctgtcacaaagaaccatccacctcttgatgggggcatgggcaaggttctaggagagcacattcttgtggccattttcagaaatacaatctgctacactccagaagcatctgtttgccttattatcatagcttctgatttaattctcccagcaaccctaggagattatatgagcttattatccccattttccagagaaaattgaagatttttatggttaagtcatcctgctaatgagtagcagcttgtttcaaccgcagttgtctgcatataacacatttaactcagtcaagggcacatggtgagcaatcagaaggtgttagctagctgctgctacttctgcaaacaaagactaaggagagtttagctgattttaccaaagttgtccgagtagacttccccaaattagctgttagctttggcaggactcatcccacctcctgtagcctgccaatgttataaacttgggccttgaagtcatcctgaaactgatcttattttacacatggtggtaattgtaactgttagttaagaagcaataaaaaaataataaggggtgatatagatttctcaggattcaaaggccatatgccttcccttctatttcttccctaaaaccgttaattcataaccttagctatcctataatttgcttcaattaatgacaaacataaaagataggtgaaaatccagttaagggagttctttcagattctgtgtgagttaaatcaagtccttcttctatagcaggctaattccatgatgaagctgtggtgctaagtttatttttgcctaggcaggtagctcttccttgccacatgctatcctcttcctctttgactgtcatcctgaaaatgtgttcagtgttaagaggatttgataacaatgtctgggtatctccataacttagtccaaatctggtaccactgttaggaaaataatgtaagccatattgatcacccacgtcttattcatttgaaggataatatagttattactaattattgcgtgttaggtaacatacagccattattctgtccctttaaggtttattgatttgtaagttcccttgggtagaagagtacaaaacaaaaggcaaaacttcatcatgtttaaataacgtgattttcttctttggtgtgtaccgtaccgtgcaggagacagggaaaacaccaggtttaacggtccacaagccagataaccatgatgagttctaaagattttctctgtctttaatgttcttcagttttgtcatgagaagactggatatagctctgttgttgttcattagaggatttatatctctcttcaactctagaaaattaccagctgttatctctttaaatattgtctccctctcattttccattcccttggagattctattagatgtgggttggatcttccttatatctctatgtttcttaaccaattttttcatatttttttattttttaaatctcattggtgatttccttggatctgtcatacatttacttctccaattatgtctagtctattatttaacctttaacctttccattgagttttttgtcttttagcaactgcatttttttttttttttttttttttttttttggtgagacaaggtctggttctgtcacccaggctggagtgcagtggcatgatcttggctcactgcaacctccacctcccaggctcaagccatcttcccacctcagcttcccaaatagctgggactgcagtcacctgccaccatacccagctaatttttatattttttgtagagatggggttttgccatgttgcccagtctagtctttaacttgtgagctcaggcaatccacccaccttagcttcccaaagtgctgggattacaggcatgaggcaccacacccagcctagtgactgcatttttcttttttctagaagttctgtttggtccttttctgaacttttcctggtctcttttttcattttccctgtttatttgtttttatcatggattttataccttttatttattttctttttttttttctagttacatgattacttaggattttatacattttattacctctctatattaactttggttttttacattgttttattatctctaattcttattggactaattcttttgtttgatgcatctgttagttttccctcgtggtggttggtttcttcatatggtttgtaattttttattgtgagctcatctttggcgagagtggctcatatgccctgattgagaatgtgttcctccagaacaactttatgttggtttggctgaatcctagcaatttcagtaatcttggactggcttttaagttattttctcaccttgaagcacatacagtcaaggaatgtacatttgtaacttatactatgtgtggtgcaagcctagaatttccatttctcaatatgactttcttttccataaatggccctaagctgatagcaagttttcattctgcctctctggacatcttgcagcatttttctaaaccctctttcatagatgggatagcttttcaaggctctggacgatatgcaggtggcatatccagaatctccctttgccctggccaaggccacatcactaatcttgtgtgagctttgaagccccttcccctcagcccatagacctatacacagtcctaaaatcttaatgggcagtcctactgacagctgccttgtcaccagctcctgtgatcattctagctttgatttttctctttctttctggcacctggtgttcccctttctctttcaacaagtttttgctgtgctttcctagcacttccatatgtacgtagcaggaggaggctgaatgccatctgctctgtctgccatgttgctgtaaatcacagtgagttttttgtaagtgtaacagcttccattctgcagtgtgttttgagtctgactcttagatccatcacttcctcacagtgttatcttgggcaagcatcctaacatttctgagtttcagaaacaaaatagagataaatgctgactttttagggttgttgggaaaattaaacagataatgcatgtaaaacttcttgaaacttcttctggcacatagcaagtcagaggttctcaattctggctaggttggcttcagtatcccctgggcaactttttaacattagacatttctgggccagaagcaatggcccacacttgtagtcccagctacccaggaggctgaggtaggaggatcactggggcccaggaggtcgaagtttgccatgagctgtgatcatgccactgcactccagcctgggtgatagagtgagccccgtctcaaaaaataataaaataaggtaaaaaaaaaaaacaaacacagagatttctgggtgctacccctcagcagttatgattcattaagtctgagatagatcccagaaatctgcattttgaaaagctccacaggtgatcccgatatgccacccagtttgaaaacgttcttaaagttattcgaaaaatcgtaagtaatttcattgttctcagatttctaagcacttcaaagtcatttatttctcccacactgatattttcatctcagatgtggtgaagctgtagagaaaaacaagcgtctcatcacggcagaccagagggaatatcagcaggaactcaaaaagaactataacaagctaaaagagaacctcaggccaatgatcgagcggaaaattccagaactgtacaagccaatattcagagttgagagtcaaaagaggtaagaacagggcagaggaggcctcttcctgtgggataaagagcagcgcatggggcctagcaccttggggcatgctctgctgcacttggggagctgcagaacctcgaaagggtggaagagggtcccacagtcagagaggctaccagagtgtgattcattctgcctctgtcctccccatccctgctccttgacctctcccagacaccttggtgttggtcttgtgccagggtattcccagggctgaatgatggcctgtgttggtttttttgtttgtttggttggtttgtatgtttgttttggcacagtgtgaaggggtcgcagacctttcacttattatttgctgagttgtccatgactgatgtccatttctactgggtgatccacccccaaccctttctaaaaggctaactgatcttttcttgcttctgtacgctctctttccctctcctccctctcttttcttaatttcagggactccttccacagatctagtttcaggaaatgtgaaacccagttgtcacagggcagctaagaaaagccatcttcattcgtggagactgtggccctgcaaccctggagaaggacttgctggtacttaaaaaatgggacatttgccacccaggactgactgtacactccctgatcagccagcactctggaagctttgggatcccaggaaccatggaattattcccaaatggactctgaccagatttttgccatactggggggtggcgggatggaggatgggtactcaggcatgactgcgtatttattaaagtgtgtttttccacaatgtaccaaacaaggcataagcagcttctcctgctgactggccaatcactgcccatctgagagatgatttcctctggcccatatttgaatttattggagtaactcaaattgcctgaggaaaaatggaaaaattatccaccagtcgattcaaactgaatttcactctttataggaaggcagggcaaacttgtaggagtacgaaacattttcaataaatctacaaagggaagccttactacaattccaaaaatcatcatggttggaaatttgggaggagattatttgtgaacttgttacccttttggtaatggtggactaattgctgtatagttatttttgttttattattactgttacattaatttaacatgcatttatagaagaatacattcaaagcactgatgtaggagatacacggtacttggagcagtcagccagaaatcacagatactgctttcacttaaatggaaacaattctccgataatgctttgctttttttcttatgtcactcttgtgtactatctatttttctcctctctgggaccaagtttctttttataaagcaataatatctctgttttcatttcagaacattgtgctgtctgtcagcatatgtatatcagctacaaaatatattcaactttgacttcttttgacaaaggactttaggaaaaagaggaacaaagacattatttgagaattaaattatatatttttaatatgactgtgaccttgactgataataaagatgtaataag

SEQ ID NO: 15566 - DNA, 125756 bp, Homo sapiens
gacagacgaggtttgcgcttggctgggcatgttccgcggctactctgcggcgcgccaggcccccgctttccgcaccccgcgaccctagaagccaccgaaccgccggcgggccatggccactctgccgagcgcagagcgccgcgcgttcgcgctcaagatcaacaggtaagacgccccccgcggcgcgcaggttgcggccggacagcccagcgctggtgtgaagcggagcttcgctgcaggggccgaggccggacgagtccattcgcgtccgcggcggggcgcgcctgagacctggggcgcccggttcccgaggctgcggcggtggagccgctggacgcgcggcggctcctgcgctgggcccggcgaggtcctccccaagaatctcggtgctcctggatgtcctcagccgccggggatcccttccccgaacaacctcgcccgctccgccctccaggttcttacaggtggccgggtcccagaagggtgataggcgcctgggtaaccgtgttgggcgcgccacggagtgtctcataaacggctccttcctttgaggcaagtctgagcgcggggggaagaagtgaagtggctgaaattagagttgcgtttgaggcaggctgcaagccttctgtcgtcctgagcaaggctccgtcctcgcctgcttcattattccagaaagagcttggctcctggtggcatcgctatttttataccctggtccaaaggagccatgaagtggaaaaagtgattttttaaaaaatctacacttaaataaaccaaaagaaatggcctgtggctgacattttgagatttacagaactccagcaaaaagctaaggactgggggatcccaactcaccatccaattcctaatcaaagttgcacaaactaaatatgtaagcacatttactgctcaaagttctcagtaaaggtgctttaactgcagtttttcctccactaaaaactgctgacaagtaattgggacatttttgtcttgccctgagaaagctagactgtctagttaaaagataataggaaactcattctaaagtgtcaacttattctattgcccacagggctgtccgatttgttaatcttcacttagctgagcctgtgaaaggtggattccaccgtaggttcatctttgtgctgttagtgtgtgaagaggtttgaacaaggaattaaaagcctagaaaaacaaggcgataaggtcttctagagggcatatcgagctttattgacgattttatttccacttgatacgtgactgccagcaaactgtttctcttaccttactatttcgtcatctgtaaaatgagtttaattatttatgtatattgcatattaatgttggaggccaaaaggtactagtcaaaaggcataaagaggctgggtgccatggctcacacctctaatcccagcaatttgggaggcccagatgggaggattacttgagcccagagtttgagaccagcctgggcaacatagtgggacccctgtggctacaaaaaaataattttaaaacattagccaggtgtggttgcatgcacctgtagccccagctattcaagaggctgagacaagagcatcgcttgagcccaggaggatcacagctgtgatcatgccactgcattccagcctgggtgagagagtgaaaccttgtctcaaaaaacagacaaaaaaaaaaaaaaaaaagcaaaaacaaggcatgaagtatatcagggatctccctatgggaatttttttctacattaaggttcatagctgttgcatgccaggaggggtaattcattcaaggagtatagggaatcaaactgaagttactgatgggtgtattatttgctatagctcctgatcctctgtctttgtgaattttagatcaggaagtgtgactggggcagaaagatgttagaaactatggggttgggcagggttgatctggggtgagtggccgagacccggactaatcctacaggcagtcttgcaagcaactgcggggtcggtgtcacctgggggttaagaataaaggccctggttagtgtctgatctgcttgcaaattggctctctgctacaaagtcactgtgcaacattggacatgttacttaacttctctaagctttggtttctttatgtgccaagtagagttgatcatagtacctacttcttatgactgtggggaggattaaatgaataataggtacaaagtccgaattgccaagtgctggatgtgtaacatacacattggaatttagagacagtacagaaaaaataatgcaaaatgtcttgttaatgattttcatgttgattgcatgttgcttgtagtgtctggctcagaataaatggtgaataattcttagttgccatcattaacattacaatcagcttcactgctgtcattatctccatcatcaccatctttgagagcctaagatagaaaggtaggaaggaaagctgaagttggagagcttcaggcagagatcagtttgggttaggtatggagatgccagtggctggctgggagctttcttggggccagtgtttctccgcctgtgccttccatctggtgctgagaacccaaaacacattcaatggaagaaaatatgtgatgaaatctgatcaagaagagccccctcaagtttaataaagtataaaaggttctataatcctcaggcaagaaaatggattggaaattcgtattcttagagttctgttttcctttttgaagcactctgtgtgttgtgtgggagagttatgctaaggagcttggcagaaattattattcaaaggagcagattaataaggacatacctagtattcatatatcatttaatttcaccatttattgtttacttattgtgtcccagacactatattatacagttaatggattttatgattaaattctcacaaaaagcctatcaaactcatgaagtcttgtacagaagaggaaaaggaatcttggagatacagctgcacaaggccatgtaattttttcaagaccatacaaccagcaatggcagagctgggattgcaaactgctccaaagactgtgctcttaattgggccgattgttattttgatgcatatgtatcccaagaatttcctttaaagcaagaggggaattaatttttaaaaaatcatcattttggtagcagcattggcaaagtgttctgtttctgattagtgtttaatatataaacattaacaatgtgatgttttgcaatgttgaaggtggaaaagaaatgttttcccttacgtgcctacctattattttttttaaataggtcaaattccaaaagtaagactgtgttgaaatatggccattagtacattcagcatgtgctcatgtttttcaccttactactcagaatagtgtaaactatctcttaaaaatatttgtgggataaaaccagtgtgcttcctgttaatgaagtattcaaatctgatatattaaaaatattatttgtaaagcgttcagttctgaccacaccagtctccagaaggagtgagcagactatctcacagtctgagaagaaaggtgaaattaattttcttgtaagtgctatatacttgtcttcatttccatttttttgttgctgacttgcgtgccaaggaaagactagatctaagttaggcagttcgtaataacatttgcgtttgggatttcaggtgctgctgcattaaatgtcataacatggtacttgtgggaacatctagtcttgttaattgccttttttcttactggaatttagtgcctttgtagattataaaaattattactagtactctgaaaatttattaaacaaaatcttagtgtctttcaaatacagaatagatgtaaaatttgatcaaatattaaagtaaaataagaaccttggataaagaggacgaaagtgtagaatgcagaaaaaaacattaaccctcttgtggacagtcaggattgaaaggaagaaaaaataatggcttacacttctagaatgctttctatgtggcagagacagttctaaatatttacatatcgtaactcattcacctctatgagataggagcaatgactatctccgttttacagatggagaaactgagtgcagagaagatatagaaattgtccaaactcacaaacaactaattaaggtcacagctgagattcaaatgcaggcagcctggctccagagtcttctcttttaatcattataccatgctgccatctcagttttattttaaaataataataggtaacatttattaattatttactatgtgctacatattgtgctaagaactttatataccttcatttcgtcctttcagaaaaggaacaaacagagctgggtgcactggctcacgcctgtaatctcagcattttgggaggccaaggcgggacgatcacctgaggtcaggagttcaagaccggcctggccaacatggcgaaaccccgtctctactaaaaaatacaaaaattagccaggtgtagtggtgtgcacctgtaatcccagctacttaggaggctgaggtgggataattgcttgaacctgggaggtggaggctacagtgagctgagatgtgccactgcattccagcctgggcgacagagtgacactctgtttcaaaataaaataaaataaaaaataaaaaaggaacaaagtattaggcataataatcatcaccagagagtgattttatgaaagacaaaaacaaggtggcaagaagagagaataaagttacataaagatagcatttaagaacaaccacaggctgggcatggtggctcacacctgtaaccctagcactttgggaggcctaagctggtagatggctcgagcccaggagttcgagaccagcctgggcaacatagcaaaaccctgtctctacaaaaaatacaaaaattagccagctgtggtggcttgcacctgtagtcccagctacttggaaggctgagatgggaggatcactcgaacccaggaagttgaagctgctgtgagcagtgattgcgccactgcactgcagcctgagtgacagagcgagactctatttcaaaaaaaaaggaacaaacccaataattttgggcataacgaccagagcacaatgagctacagagagctttctgagaagtatttgctaattttatctgcaaagataatacaagcataaaaatatatgtattcaaatgtatagatgtgtatctgcagtgagagcagagctgttcctcagtagtgggggtggctggcagagtgaggtagtgtgctttcaggaattgctttatttgtctgatgtgttctagaccaaagaccaacagaggggcttgggcaatcagacacagaatttttggcctttcacatttagaatcggttccttccagattcttggaaaaggtccatttgtgctttaggcatctagtgctattctgaagatgccttacaaaatgtatgctgaaataaccttctaccagggtgaattttcttcatttggagttctttgagttctgaccatttatgtatattgatgaagctaatgtttacttcttcatagaccagtggaaagaaaacgtagtaacatgtagttgcccagggaaagatgaagaactcaggggaccaagtctcccatctcaactccccataaaggtagtgatggaatgggatgatgttaaaaacacctcaactttccgtcctctttaagggaccgtgagaaggtagggatgttaccatactcagacttcttgctgagaaagctaagaaacaaaagcatttagtttttttcagtggcaggtgcttattaacgtttggcctatttgataaagggttaaagcaacaggaatgtgctactgctgttcccacaagcagtagtctaatttctttctttttttttttttttctttttttgagacagtcatgctctgtcgcccaggctggagtacagtggggccatctcggctcactgcaacctctgcctcccggattcaagcgattctcctgcctcagcctcctgagtagctgagattacaggtgcgcaccaccacgcccggctaatttttgtatttttagtagagatggggtttcaccgtgttgttcaggctggtctagtcttacccagtcagcagcagaaaggctctctgggctctaggtaaacacatgaaatttatatagtgtgtttaagtgtggttcctgtgcttctggagttggcacagtagtggtaccatttgctgtatcgacaacagtgggggtatagacgaaaaacagattgacacctctgaaagtatatatgaacacatgtcgatgcagcatttctggtgaaactaagcaaattgataaagttggcctagggtacaagacattatgtcatgtcccactgcattatgattaaacccaagattagaaaggagaaatgatggcaacagaaccagtttctccagctgtctattctcatgttcatcatcacagataggaaagggcagccggccctctgcatctgtgggcacatccctggattcagccaaccacagatcaaaaatatttggaaaaaaatgtagatagttgcatctgtactgaacatgtacagacttttttcttgtcattattccatacaaaatatagtataataactatttacatagcatttacattgtgttaagtattataaataatctagagatgatttaaagtatacaggagggctggccaccgtggctcatgcctgtaatcccagcacttttggaggccaaggtgagtggatcacttgaagtcagaagtttgagaccagcctggccaacatggtgaaaccccatctctactaaaagtacaaaaaaaaaaaaaaattagccaggtgtggtggcaggtgcctgtagtcccagctactcaggaggttgaggcaggagaatcgcttgaacctgggaggcggaagttgcagtgagccgagatcgcaccactgcactccagcctgggtgacagagtgagactctgtctcattaaaaaaaaaaaaatcatgaacaactctgcatgtaaatcaatacagagctgcattataatttacataggctgtataaaatcctgttgattagatgtaaaatgatttattaaattaattttctattattgggcatgaagataggttccaggctgggcacagtggctcatgcctggaacctgcctcccggtgctttgggaggcagacacaggagaatcagttgagcccaggagttcaagaccagcctgagcaacatagtgagacaccagctctacaaaaagcaaacaaaacattaggcagacagggtggtgcatgcctgtggtcccagctacatagaaggctgaggtgggagggtcacttgagaccaggagtttgaggctgcagtgagctatgattgcgccactactctccagcctgggccacagagtgaaaccctgtctcaaaaaaaaaacacaaaaaaccaaaagagataggttctgacttttcacaatagtgtatagagtttgatggagcagtcttatacatacttttttctgcgctagtgcaaacacctccttacaaatttctaacagtataattggtcataggaaagaaacatttttcaagcttttgattgccaaattgacgcccagaaaaggtatacctgtttctgctcctaccagtggccctacgaatgctcctttccccacattcacacccccaccgagttttatcattcttttaaatctttatttgccagtgttgacctcttctcttaaatgcctgtaacctcttcctgtttagcttctctcctaggtcagagagtgaactctgaagtcattctttagggattaaaatagtcatgcatttctccttttttctttgccttacatgcaaccataaatggtgagaacttctatcctttttcactttctgcttctgttcctttaataggtggattaatgataaaggtagattgttcaaacaacttagttatttcttaattttgttgtaagctctagttgccagactttaaactgtgctttttactttgcttaacaatgtaatccaatctacctcctcctttgggtgcctaagccatagcccttttaaataaaatagcaaatggaaaatcagaatccctttctatcgcaaaataagagtccagattacataactcattgtatgtgttttcacttggatgagagaatagagagtatggacctctttcatactttttttttaatgttccttttcctctagaattggtttctggggctaaaaggaaacagtagttagtaccactctgctcagaaacctcaaaaaacttcgacttctgtcattctcatcaaagggcaaaattcattgttcttctgtgatagagaccaaaaatacaaatagctaaactggaactaaattaagaaaaacagaagttaataaactccaccgcctcactcccatctcttcgtaagttagtaggcttgtaagtcctaggctggttagttcattcatttgttcactcatgccagccattgaggattattgtgttctaagtgctgtgctaagccccagaaatacaaagacaagtgagtcatgggcctgcctgcaaggagtgaggagatttactcaaaattgagagctggaaaaagaaaggcactttccctggcctcatagccctccgtgacttcaaagtattcctctctggggtcatgccactagggataatagcattatccaaaaacatttttggaaatccttttagaattattctcagggactggagtacatttatttttaaaaagaaacttggtgttttaaaatctttttttttttttagggagaatctgctttattatttgagaagtttcaaaaaatatagaaaatacagatgataatatggcaagtatctaaaggtctccacttaacagaattaacatctgttaacattttgtcacttttgctttagttgttttttttttaattaaaaaagagaacattacagataaatgtgaagtccctgttattctgttgcccatttctgttctccctgctgctccctgagagtactaacacaaaggtgtacttctggggtgtgtgtgtatatgcatatccataaacaatatatggtatagcttctggagggatccaaagtcattagcactcaagcaagcctattaaataaaataatatcagcttgagttaaagataacatatagccgtgaaataacggagctgatttttaggtaccttgtcaaatagttctgaaagtaattgcaaagaggagttccaaaagtgagttcagaaagacagctttatcagaataaattgcatggtactgcatacaggaaactataaagaacaacggttatttagaactgttcattctgacagtgtttttcaattactccttaatattataaccacttactcatttcctgaaatcaccaggaaatttttcaaaaagatttttctcccccgatgaatatacccacgatttgcatttgacccaagataagcagttgagtcgataacatgttaatttttaaatacatggttttaaaacacagaataaaaattctacctcattgcttggagactcaattaaggagagtatgcacattagcaaaaagaagatgtgatatttgctcagaagtcttgaagtggatattttggccttcgtatggctgaatggtcaagcttgactctctcgtttgctcagggaggcccagtccctctgctgccacgggtagaaatactttttcctaaatcgctgcttcttctcactgccatacagagcaatattcaggacacagccaaaaccttctttggcagacctttttgagttctctctactcagctttctgctgtgtaatatgagcactctagagaagttgggctgtcctcaggaaattacacttggggtctgtggttccccaggaagacaaactggagctccctaaggggtactagtcatcatacggcatttatactagcattgcagtccactttcacctatgcaagtagaaaaactcaggctcaaagtccactgacaatgcaggagtcccttatctgctggttaacataaatgttgttttaagatgatggccatctgttgtctgtgagaacaagactatcacccacctgttgacatgctggctggtttaatatcttactctttcattccaaataactacctggtctcacagatccccttagatggggtatccaatttacctcctgtaccttattctctgtccaataatttcactcaaatcaacaagatattttattgcctatgacttcctctaggtattacgggagattcaaaacacaaacagacaagcagcctatgccctcagaatccagctggggtgagtgggtgactataaatgcaaaagttagagagcatggggaacagtgtttgattgtgtggctggggaggggtaaggacaaaaactcagagagagagaagcctgtagccctggctacagaagggcaacacctctgaggagatgagtctcagctgggccctgaagggaggtgactcacagatgaaacaaacctggtgggaagaatagttagcagtgtgcagaaggcattggaagggattccaggggaggagtgaggagggagccacagtcattccgatgtgaggtagtgagatctgggattagactgggtcatcagaatggaaaaaaagggcctgcttctgcagacagtttaaaggaatcagctggatgtgggaagcaactacatacttattcattcattcatttcatgcatattgcttatagcctactatgtgcctagcactattctaagtgctgaggatagagtcatgaataagatagacagggttcttattctaaaaaaagtaatataccagtggggagacaatgaagaaataaaccactaaataaacaaggaaacatcagataaaataagtgtgatacagagaatgtaaacgggccattgagagggcatggattctttagatgggatggtcaaggaaagcatctcttagagaaaaacctctgagccaagatcaagcaggggaatgacgaagcacatgactgaggcaggagtaaatttgatgtgttggaagaaaagcaagaactggtctgtctctagtggagtgaatgaggggagaggaggagagctgaagagggaagttagcaaagaacgaatcacataaaagccttaaaggcaatggaaaaaatttaaatgttattcaaagtgcaatggtgtattagtccattttcatactgctatgaagaaatacccaagactggataatttataaagaaaaaaaggtttaatggacttacagttccacatggctggggaggcctcacaatcatggcagaaggtgaatgaggagcaaaggcatatcttaaacggcggcaggcaagagagcgtgtgcaggggaattgccctttataaaaccatcagatctcgtgagacttattcactatcatgagaatagcatgaggaaaaacctgcctccatgattcaattatctcgcacaacatgtggggattatgggagctacaattcaagatgagatttgggtggagacaaagccaaaccatatcaaatgggatggtttatggagcagggcatgatgcgattgacttttgtgtttaaaagatctattgtacaaagaagcaaggaaaccagctgggaggcagtggagaatccaggggaaagatgacgatggcaaaactagagagcagagctgagaaggagagaaccaggcagctctgggataacattctggagctagggctgacgaattagatatggggtggggcaatgaaaaacaaaaaaaaagagaaatcaagatgtctccagggttggatattgatgcttttaacagagattgaaaagactggaggagaagcaggcttttagggtgaatcaagggtttaactggggacatatggagtctaagatgcatgttagacattcaagtagaattagctactatgcagttttatttaggaatctgaaactcaggggagaagtcaagactggatatttaagtttgcaagtcaataccaaacatatttttacataagaaggaaaaaatattgatatgattttgataagtttttaatagccagaaagctatatgcgtaatatggtatcattttaattaaaaaataaatatatgcataactctctgcagagataaatgatcaatacatataacaaggagagaaccagaaggacatacgccaatatgtcatgagtgttatctctgggtagtagaattattgatgacttttgtgtacttgggacatgcatgtatgagtgtatgtatgcatgcatattttgcaagttttcctcaaaggatgcttttgtaattggaagaagaagcaattataaaataaatggcacaagatttccatcctggtcaaatgggataaggatgatgccaatgagaaattatgaaaattggaaattagacttagttttggggggatgattttttacttccctcgtagaggttttgtttaagacgatgtagtagactgtacctttacatatatttgctgtccctcccgatgggaggattttacttttcacctgttgaaggtgatgtggtcacttggaggtgaagagatagcctggactttgtcacattatctttctcctattctaaacaatctgcagcgttccaggtggtggatgatctgtcatcctgcatcctggagtaaagatgattaaagcagagctgcagctgccctctgaaggcctttgtttttgtaaaccactgagatttttgaattgtttgttatctcaccataacctagcccaccctaacacagatgaacataaaatacagaacatttctattgggcggcttgaaatacaggcttggggcatcagtggtaggtcagcatggaaaatgttgattaaaaagtcatctgtgaggtggagattgggactgaagaatggataaattttctgaatggaaagtataaggggaagagaagaggaatgggcctagaggaagagtcactgtcaatccatacaaaaagaagagatacgaaaagataggaggggggatttggccaacacatggcagaccgttgtagtatcagaaaagagagctaggagggtagttacaaagatcacatgccaaattatgagggcaaagagccattggatttaccctgaaggtggtcattgaaaacctctgaattagcagttttagcggagctgtggggaaggaagtcaggtttcataaggttatagagggagtccatgcagaggaaatagaggaagctggtggaggccactcctttaaaaagcctggatgaggccgaagagaaatgggacaagtggtaaccagaaggcccctacaaggctgtgacttttacacaaatatgacatacaatgctgaacaaaggatgtgctgatcttacagaggaaggatgtgttttattcccaaaaaaaactttacatatgggtaaagttattcaagagaccctgtgctgtctaatatgcaacaaatttttctttgcaccagcattaagacttctaacaataagtaaaatattctatttagatactttttacaggagattttgaaactctgatgacactgacatactacctttcagaacatggtactgtttaaaattttattatttttatatttatcttcatatgtttaaatttgaaaaattacaggaaagagtacttttataattatgtttttctgtttacaaaccacctcctgtgtgctgaattttgcctccccaacatttttcaggggagcatggccctactcgcactttgagttcagatttctggccttcagaactctgagaaaataaatttcttttgttttacgctatccagtttgtggtagtttgttacagtagtcctgggaaactaacaaaccaccccaaagtttagtgacttaaaacagccattattatttctcacaattctgtgggttggcaatttgggctgggctcagctggacagttattctgctggtcttcctgtagacattcacatggctgccattatcgggtggctcaagtgaagctgtagggtctaagatgggctcactcacaagtccaggaccttggtgctgactgttggctgagctttccctcttcacacggtctcttgttgttcagaaacctagctggtcttttttgcattcttagctggtaaagggaacattctaagagaaggaaggtggaagctgcaaggcttcttgaggcttaagtctagaactctccaacgtcacttccaccacattcattggttaatgcaagtcataaggcaactcagcttcaaagagtaggagaatagaatcaacctattgaaaggaggggctgcaaaatagttggtcattttaaccaaccacagcacccaaccaaaaaaattaatactatcccgtttcagatttcagaatgtttaatcagaaggccttgtctttccctacgtatatcacaatacccattttagtggcagagaaactgagaccaaataaaactgactcctttaaagttaccaagtgagtcatgctttgtgagagacatgaagacaactatatgtctggaagagctaaacatagtcctgcctggaggcaggtatatgaacttaataatcccttgagatgctcttaaatcccataattacactgatggactccagattgcagagctgtctggtccagagataaagcagcggtttgagagtatcagagagagaaggtgcctgaaaattgccacatgtccccaaaggcaggatttgaggctaaattaaatgataaagagttaccaagctctttattctcaagagttaccaaataagcttagaaactcaatgactgctgctgtctagtgttagttctggaatgggagaattaaaaatgagtagaaaaagaaaatagagacagagagactaacatatctgaaagataggtgctgtgggcagtcttagaaggatcacccctatatcaattaggattgcttttagctgctgcaagtaacagccaaccaaaccatccaatggtttaaacaaattaggggtttatttttttcttttcatttatttatttatttttaaatttaattttattattattattatactttaagttttagggtacatgtgcacaacatgcaggtttgttacatatgtgtacatgtgccatgttggtgtgctgcacccattaactcatcatttagcattaggtatatctcctaatgctatccctcacccctccccccaccccacaacagtccccggtgtgtgatattccccttcctgtgtccatgtgttctcattgttcaattcccacctatgagtgagaacatgcggtgtttggttttttgtccttgcgatagtttgctgagaatgatggtttccagtttcatccatgtccctacaaaggacacaaactcatcatctttatggctgcatagtattccacggtgtatatgtgccacattttcttaatccagtctatcgttgggcatttgggttggttccaagtctttgctattgtgaatagtgctgctataaacatacgtgtgcatgtgtctttatagcagcatgatttatagtcctttgggaatatacccagtaataggatggctgggtcaaatggtatttctagttctagatccctgaggaatcgccacactgacttccacaatggttgaattagtttacagtcccaccaacagtgtaaaagtgttcctatttctccacatcctctccggcacctgttgtttcctgactttttaatgatcgccattctaactggtgtgagatggtatctcattgtggttttgatttgcatttctctgatggccagtgatggtgagcattttttcatgtgttttttggctgcataaatgtcttcttttgagaagtgtttgttcatatccttcgcccactttttgatggggttgtttgtttttttcttgtaaatgtgtttgagttcattgtagattctggatattcgccctttgtcagatgagtaggttgcaaaaattttctcccattctgtaggttgcctgttcactctgatggtagtttcttttgctgtgcagaagctctttagttgaattagatcccatttgtcaattgtggcttttgttgccattgcttttggtgttttagacatgaagtccttgcccatgcctatgtcctgaatggtattgcctaggttttcttctagggtttttatggttttaggtctaacatttaagtctttaatccatcttgaattactttttgtataaggtgtaaggaagggatccagtttcagctttctacatatggctagccagttttcccagcaccatttattaaatagggaatcctttccccattgcttgtttttgtcaggtttgtcaaggatcagatagttgtagatatgtggcattatttctgagggctctgttctgttccattggtctgtatctctgttttggtaccagtaccatgctgttttggttactgtagccttgtagtatagtttgaagtcaggtagtgtgatgcctccagctttgttcttttggcttaggattgacttggtgatgcaggctcttttttggttccatatgaactttaaagtagttttttccaattctgtgaagaacgtcattggtagcttgatgcggatggcttgaatctctaaattaccttgggcagtatggccattttcacgatattgattcttcctacccatgagcatggaatgttcttccatttgtttgtatcctcttttatttcattgagcagtggtttgtagttcttgaagaggtccttcacatcccttataagttggattcctaggtattttattctctttgaagcaattgtgaatgggagttcactcatgatttggctctctgtttgtctgttattggtgtataagaatgcttattatttttatacattgattttgtatcctgagactttgctgaagttccttatcatcttgaggagattttgggctgagacaatggggttttcaagatataaatcatgtcatctgcaaacagggacaatttgacttcctcttttcctaattgaataccctttatttccttctcctgcctgattgccctggccagaacttccaacattatgttgaataggaggtgagagaggacatccctgtcttgtgcccgttttcaaagggaatgcttccagtttttgcccattcaatatgatattggctgtgggtttgtcatagatagctcttattattttgagatatgtcccatcaatacctaatttattgagagtttttagcatgaagcgttgttggattttgtcaaaggccttttctgcatctattgagataatcatgtggtttttgcctttggttctgtttatatgctggattacatttattgatttgtgtatgttgaaccagccttgcatcccagggatgaagcccacttgatcatggtggataagctttttgatgtgctgctggattcggtttgccagtattttattgagtatttttacatcaatgttcatcaaggatattggtctaaaattctcttttttggttgtgtctctgccaggctttggtatcaggatgatgctggcctcatcaaatgagttagggagtattccctctttttctattgattggaataatttcagaaggaatggtaccagctcctctttgtacctctggtagaatttggctgtgaatccatctggtcctggactctttttggttggtaagctattgattattgcctcaatttcagatcctgttatttgtctattcagagattcaacttcttcctggtttagtcttgggagggtgtatgtgtcgaggaatttatccatttcttctagattttctagtttatttgcaaagaggtgtttatagtattctctgatggtagtttgtatttctgtgggatcggtggtgatatcccctttatcattttttactgcgtctgtttgattcttctctcttttcttctttgttagtcttgctagcggtctatcaattttgttgatcttttcaaaaaaccagctcctggattcattaattttttgaagggttttttgtgtttctgtttccttcagttctgctctgatcttagttatttcttgccttctgctagcttttgaatgtgtttgctcttgcttctctagttcttttagttgtgatgttagggtgtcaattttggatctttcctgctttctcttgtgggcatttagtgctataaatttccctctacacactgctttgaatgtgtcccagagattctggtatgttgtgtctttgttcttgctggtttcaaagaacatctttatttctgccttcatttcattatttacccagtagtcattcaggagcaggttgttcagtttccatgtagttgagcggttttgagtgagtttcttaatcctgagttctagtttgattgcactgtggtctgagagacagtttgttataatttctgttcttttacatttgctgaggagtgctttactgccaactatgtggtcaattttggaataggtgtggtgtggtgctgaaaagaatgtatattctgttgatttggggtggagagttctgtagatgtctgttaggtctgcttggtgcagagctgaggtcaattcctcggtatccttgttgactttctgtctcactgatctgtctaatgttgacagtggggtgttaaagtctcccattattattgtgtgggagtctaagtctctttgtaggtcactaaggacttgctttatgaatctgggtgctcctgtattgggtgcatatatatttaggatagttagctcttcttgttgaattgatccctttaccattatgtaatggccttctttgtctcttttgatctttgttggttgaaagtctgtttcatcagagactaggattgcaacccctgcctttttttgttttccatttgcttggtagatcttcctccatccctttattttgagcctatgtgtgtctctgcacgtgagatgggtttcctgaatacagcacactgatgggtcttgactctttatccaatttgccagtctgtgtcttttaattggagcatttagcccatttacatttaatttaatattgttatgtgtgaatttgatcctgtcattatgatgttagctggttattttgctggttagttgatgcagtttcttcctagcttggatggtctttacaatttggcatgtttttgcagtggctggtactggttgttcctttccatgtttggtgcttccttcaggagctcttgtagggcaggcctggtggtgacaaaatctctcagcatttgcttgtctgtaaaggactttatttctccttcacttatgaagcttagtttggctggatatgaaattctgcattgaaaattctttcctttcagaatgttgaatattggcccccactctcttctggcttgtagagtttctgccaagagatcagctcttagtctgataggcttccctttgtgggtaacccgacctttctctctggctgcccttaacatttttcccttcatttcaactttggtgaatctgacaattatgtgtcttggaattgcttttctcaaggagtatctttgtggcgttctctgtattttctgaatttcagtgttggcctgccttgctagaatgggggacttctcctggataatatcctgcagagtgttttccaacttggttccattctccctgtcactttcaggtacaccaatcagacgtagatttggtcttttcacatagtcccatatttcttggaggctttgtttgttgctttttattcttttttctgtaaacttctcttctcacttcatttcattcatttcatcttccatcactgatacccttttttccagttggtcacatcggctactgaggcttctgcattcatcacgtagctcttttgccttggttttcagctccatcaggtccttttaggacttctttgcattggttattctagttatccattcgtctatttttttttcaaagcttttaacttctttgccattggtttgaatttcctcctgtagctcagagtagtttgatcgtctgaagccttcttctctcaactcatcaaagtcattctccatccagctttgttccattgctggtgaggagctgcgttcctttgcaggaggagaggcactctcatttttagagtttccagtttttctgctctgtttttttcccatctttgtgtttttatctacctttggtctttgatgatggtgacgtacagatgggtttttggtgtggatgtcctttctgtttgttagttttccttctaacagacaggaccctcagctgcaggtctgttggagtttgctagaggtccactccagacgctgtttgcctgggtatcagcagcggtggctacagagcagtggatattggtgaaccgcaaatgctgctgcctgattgttcctctggaagttttgtgtcagaggagtacctggctgtgtgaggtgtcagtctgcccctactggggggtgcctcccagttgggctactcgggggtcagggacccacttgaggaggcagtctgcccgttctcagatctgaagctgtgtgctgggagaaccactcctctcttcaaagctgtcagagagggacatttaagtctgcagaggtaactgctgtctttttgtttgtctgtgccctgcccccagaagtggagcctacagaggcaggcaggcctccttgagctgtggtgggctccacccagttcgagcttcccggccgctttgtttacctaatcaaacaactaactcggcaatggtgggcacccctccccaagcctcgctgccgccttgcagtttgatctcagactgctgtgccagcaatgagcgagagtccatgggcataggaccctctgagccatgtgtgggatataatctcctggtgtgccgttttttaagcccgttggaaaagcgcagtattagggtgggagtgacccgattttccgggtgccgtctgtcaccctttctttgactaggaaagggaattccctgaccccttgcacttcccgggtgaggtgatgccttgccctgcttcggctcacgcatgttgcgctgcacccactgtcctgtacctactgtctggcactccccagtgagatgaacccggtacctcagttggaaatgcagaaatcacccgtattctgtgtcgctcacgctgggagctgtagactggagctgttcctattcggccatcttggctcctccccttatttatttttttcttacataacaagaatgccagtggttggccctgcaggcttggtgtcatggcccccaaggtaccactggagactctggttctttgtgtctttgtgtcccaccaaccttagtgtgtggctttcatccttatggtcacaggatgactcctaaaactctgtacagtgaatcagtattggagacaggaagaagaaaggaggtaaaaaagacatgccagctaactttgctcccattaggaagctcttctagaagctcacagaattacatttgtttatgtatttcattattcagagctgcgttagctttgtctacaagggagattggcaaatgtagttttcattagcccagcacattgtcacccccaacaaaactagggttgagttagaatgaaggggctagtgcatattgataggccactagtagtttctacacagcctccaacaattgctgtggatgtagattagtaacagaacttccactatggcatcatagcacctctatcccactagtacctgtagtaggtccaaatcatctaattccaggagcctggcttaaagaagaggaatattgaggcttctaggtccagtattaatcaaggtaagctagctgtgagaacaaacaatctcaaaatctcagtgaacgaaaccaacaaaaacttgtttcatgtttatatcacagtctgatgcagatcgagtggttctcctccaagcagtgactcagggacccaggctgcttccatcttacagctctaccatcttgtgactttcagattatgttggcatcattcagccagtgactaggaagaagagagaatgaaagattgtgcacccaattcttaaatacctccactcaacactgggacacatagcttctactcacacttccctggggaggactgcttacaagattcatcaatctgcaaggagggctgggggaatatattatagttcttgcctggcggcacttccagcaggaacacttcactatgaaaagggagcacaagtctttggggggacagctagccttctgtgccacaaaagcccagtcacaaagaaaaagccattaccaaaatgttccataaacaatgtagacctactgtggtttgctgttgtctgatagataaaaactgtgttgttttagtcacaaggatttggatgtgggagctgcaaggaaagcaaaagccaaacaagtacagctgaagcacctgagatcctaggaggagacaagaagaatacaaggtgccattgtcctatcagccaggcagaaagatggtaggaaacaaggccatttaaaatctaattgcaattgcaagggctgggtgctgtggcttacgcctgtaatcccagcactttgggaggctgaggcaggtggatcacttcagctcaggagttcaagaccagcctgggcaaagtggtgaaacctagtctctacaaaaaatacaaaaattagccaggcatggtggcatgcgcctgtagtcccagttactcaggaggccaagatggaaggatcaattgagcctgggaggttgaggcttcagtgagctgtgattgtaccactgcactccagtctgggtgacagagcaagaccctgtctcagaaaaaataataataaaataaaatctaattgcaggcaaggccacaggaagtggcaagtgcaactaaagacttcctagaaatcccacacattgataagcagccgggttgttcagccagtttttttttctgagaacaaccaattttaaaatattttaggaaaaaccacaatattgagatatttttaaacagcttatatttaaacagcatatatttaaacaaagtgattaatttagaattcatattttatttgagaaaaaaacaagatgttcctggtctggcagatgacattctaaattattcactcccacttgtggaatagctgagttatagtccggcccctcctctgtagaggaggatttataggagaagatgagtcacgttactttttgtgactatttttctttgcatttgttgactcctcttgttttattcaccttctaatcattgaataatctgtacaatcagactgccttattcatgttggcagttgttttaataataacaatgcacagagccattgctactaacagaaagcagggcagacctttgagtctgagtttggggatacaagtttgattccatcccagctccactgattcccagcgagatgtggttcaacatcataggaccaaatgaaataaaaagcgtgaaaatgctacacaaatcaaagagtgctaaagacatattaatgaaacatctgtaaaatgggaataagtaccacgtttctgaggtagcatgtaatacaactggcacagggttccacacttggtagatactcaaaaaagaaaataaaaagttaacatggacaaagtaaaataaactggaaataggagatggagaaatgttaaaacaacaggcaccataataatgtaaagtaggatttcagctcatttacaagcacagaggttatatggtaagtcctcacttaatgttgtcagtaagttcttggaaacagtgtctttatgtaaaacaacataaaggaaaaccaattttgccataggctaatggatataaacaagagttaagttccagtacatatgtgatggcatatttccagttacaaaatatcaccaaacttctaaataaagaccaaaagactcctaatattaaacattgaaataaatgtgagctatactttcatataagaaaaattaatgcaaacaagtacaataattatttactgagttattccagttcggggtcgtggatggccagagtctatcccagccgtccagggccaagtttggaacccaccctggccaggacgccatcctatcacagcttgcactcacacacactctcactgggaccatttagacacaccgattcacctactctgtgcatgtttgggatgtcaaggaaaccggagtaccctgagaaagcccacatgggggaacatgcacactccacacagacggtggctccagccaggaattgatttattttctcatcaatgttataactaaatgactttgaatgaaacaatgttatttgataacctgctgtatttagagttcacaaaatttatccctctgaaacacatacacacacgcatggccgcacacacacgtgcatgcacacactgcacacacttaatgctaaacttgaaagagatttaaaggctaaaaggaaagttggactttaaatttcccctggagctcacattttctgggtactgaaagatatggtagatacatatgattgccttttccaaaaataacttctatggaaaatcctgagagttataagagactacaaaggtgatttgatagagccacttaagtaatgtatgcaatatgatcaccaggtatacttgtatgagagatgggaaagaaaggaaatattgaaagagcagaaccatgaaggagaagaagcaattgatcctgaagaatagcaactgtagtcagggattagagacctgcaaacaagtttcctattcttttcaaaaatgaagaatagcttcttattacaaaagctgtatatataaattatagaaaagtcagaagtgcaggtaagcaaatactttaaaaatcaaaattatctctaattctttgacttattaatcattttaacagcttgattgatattttttcagatacacacatacatacatacttctacaaaactggaagtatgcttatatattgtatcataacctgcttttttatttaaaaaatatcatgaacaacttttcatgtcattaaatattgttgcattacatttctaatgaatgcataacattccattgtaaggatacagcgtaatttaactcagtctgtattgagctacattgatttccagttattcacattagaaacagtacaccactgaataaatttatgcattcatctttgcttacctctttaatgattcttcacgataaatgctagaaatagaaccacagacttaaaggtctccattgatatgtgtggctcccttgttttcctttgcaaggttttgtgtggcatctgcctttaaaaggttaaagatatttttacttataacatccctgaactttacctcaagtcttggggaaagttattgaaaagtagtttgtattcaaataagtacaaactggcaaggtcaatcttttatacaggttatcagaaacaaatcaacctcataagatggaactaaacccattattatgattgagtcagcaaacttaaagatgtgtttggtttggacaaatactattaattccttaagttccctgtggccacagtttttttttttaatgaatgtttttctgagtaatcttggtcctatttgaggccatcttcatatgcactaccaatatttccagctatacccaacaggtaaactagccctctgtaggcaattaaatgtatattttcctgaagaaagtaaggttatatagaatataagtataaggtcacctagaagagctattaatgtattatggacaatttctttttattgccagagctacatgttacttatatttaagtctgatatttaattctctattatattcccttattattgaattaattaattcatccattcatatgacagatatttcttgagcacttacttgtgccaggcactgtgttagactctggggatttggaaagaccctgcttccctcatgaaacttacattccaatgatggaaacagatcatctgtaagtgcgtaaactaatatatcatgtcagataatgtctcatttccttatctcttaaataaaaaaatattctattccatagggctgttatgagaactgagtgagactatgtggaaattaccatacacatgtttaaaaaatattgtttctttttcctcttatcttttagaaaagggaaaatgattattgtttctttttcctcttatcttttagaaaagggaaaatgatttgtataaatcattaaatactcccttgatattacaaaactagcaaattgttttttgattttattttttaaattgtcacataataattgtacatattcatggtggtacatagtgatgttttggtacatataattatagtgatcagatcaggacaattagcatatccatcatctcaaactctaatcatttctttgtattgggcatgttcaatatcctccctttaagtatttgaaacgacacaatacattattgttaactacctcatcccacagtagtatagagcactagaacgtattcctcctatgtagctgtaatttcgtatcccttaacaaatctctcccatctttcccttccccctacccttcctggcctccagtaaactctgttctactttttacttctatgagatcgaagttttttagcttctgcatgtgagtgagaatgtgaagtgtttaactttctgttcctggcttatttcacttggtgtaatgtcctccatttccatccatattgctgcaaataacaggatttcattttttaatggataccattccagtgtgtatctatcccacattttctttatccattcatttattgtcagacacgtaagttgattccatatcttggctattgtgaaaatgctgcaggaaacatgggggcgcagatgtctcttcaatataataatcttttcctttggataaattcccaggagtgggattgctagatcatatggtagttctaattagcaaattctatattccatattaaaggaaggaataggtaaatttttttcaaattttttattttgttaaagatggagtaatcctcccacttcagcctcctgagtagctaggattacagaggtgagccacagcacctggcatgggataggtaaacattttttaaaatgtttgttttgtttcaggcaaaattaggtatcaactgtttctccacaaagaagagcagcttaagccttcacagcacatagttctgataattcaggtcttcttttgccatttctcaaacatagctatcttgtgttggtacatgcgatctgcagggccttagacgaatcatacatttcatctctctgggcctcagtttcctgaagatgaagttatgttatatggttcgtaaagttcatttcagggctaacttcactttgtccttgtaaaaattatctgcctagtgggtccactccccacctcaccaccccccaaaaaatgactgctgtgctccaacccaagccaatcaaaaatgataaacacttgactgtgacttttttcaagactctgttttacagagaagtggaaaggtctactgtggaatgcttatattttaatttgtcctcattgataggagaggacaaatgtaaactaggagaaatggaaaaaccagtgatacatgtcttgttatgttaaaggaaaaagctagagacaatatgattattaataattattttttaaaattaattcttgcatttattgagcacctgctgtatccctcatatgcattaccttgtataagtcttgtaatagcccaaaaagttaagagtgttcttattctcccaaggatgcagatatggaaactgaaactgagtacggttatgcagtatgtgaggggcaatgctgccacagaaactcaagtctagctgagaccaaacccatgtttttaaccacttgcttcttgcctttgccaatcattgccaccaacgagtcaaaacttacttgttgctggaacatggtttcatcctggccttccacggaatctgttgagcttgttttttttttttttccatatgccataatatgtttagtttcacctcagatgagacagaggatttactttcaagaaagttggacgctgtccactctaaacagtaccagaggtagccttacagcatcagaaaatcctgtggtagtatctcttcatcggaacttggaatatgattttaagagttttttctatcttttcattagagcaggccaacactgacttgatttttctctgaaattagctgtggacaaagattccttttcaaactaaagattctaagcttattttcccccatcactttatcaaaactagaaacaatccattaaaaacactgcccagccttcaggggcttaatcaactcagtggtataaagcatgaaacttgattctgagatccaggagagaatatttggattgccgggaggtgacctttatatgtttctttacgtgtataacaaatacatttcaattcgcgtctagccccttaaaaccagtgcatgtttctgaccctgagtgctactgacattgtgaatcgcactgcaaacagaacacgggtcactgttgttttcctgatctgggaagacatcatggtgtggtgaaagggacagtgcgctgctgatcagacttgggttctgtctctcctctgctaccagtgaaatgaatttcagatgcaaagtggaaagatcaattgtttcttggcctctttgctgagatcaagggaagaagaaagatcagattagttccgtgacagtccaatatttactgactgacccatgttctgtttcatctcaggatttccagggggctccaatttggaccactgcagcggtcccaactgccaacctatgttttcccttcttccctacctttcccctgcagcctcaagtggttccagataaagtgttattccatgtatctcactgtctgaatctagaggactctgatacccaaatgtgtttctcagagtgtgtcaatgaaagggactctttgacccacaatccccctttttcttcacaactccatcatcggcatcctcaaagacaatccatggtgcctactactcctcatcttattgacatgattttaatgtcagctctcgccgggcgcggtggctcatgcctgtaatcccagcactttgggaggccgaggcgggcagatcacgaggtcaggagatcgagaccatcctggctaacatggtgaaaccccgtctctactaaaaatacaaaaaaaaatttagccgggcgtggcggcgaccgcttgtagtcccagctactctggaggctgaggcaggagaatggcgtgaacccgggaggtggagcttgcagtgagcagagatcgcgccactgcactccagcctgggtgacagagccagactccgtctgaaaaaaaaaaaaaaaaaaaaaattttagctctcaaagttttcctccatgttccatgaaaatacactttacaatctagtattccccccaccacacacacacacacacgcacacacatatatactgaaacgaaaccatatccaacttcatttccatttccaattcattcaacattttctattctgttctattgcatttaaaaaacgctggtcacaagccactaaactgatctcagatcagactttaataaatcagactcccccttttatacgcacagagcactctctactgtttcttcctagtacttgtcacaatttgtaagtcctaaatcatgtgattgcctacttaatgtctcccgcaacctgcccctggtgttctgtaaacttcaagaggatatgttttgctcacctttgaatttttagatcccatacaacacctatcatatcataaatgtttaataaatatttattaaaagaattaataaatgaatgtggccaaacctattcaggtctgcatggttcctccctagagttccatcacacttcacagatctaaagtttcctcccagttgtggaggtttgaagctcaaaactgctggaggtgcttcccaccatagctcgtgaaggccctattggtgttttcttcctagtccgtctctagttgatcatgacagatgggccagtgtgttttgaagaagactggctgatgcctcaccaaattctggggacaggtgcctttctccaggggaattcatgaagagactctccaggggcagggcagaccactgggaaaaacaagacccttgggttttctgaccactggccacttgtttttcccacatcaggagagtttatcatctgtgctcatccacctcctgaggttgctttgctggtgctgatttcaggtcccaggcccctaaggtctcacactcactccacaagccacctacacagctgtagttgttttcagccgacagctaggttattttgccttccaagatattttcttttatttatttattcatttatttattttttgagatgaagtctcacactgtcacccaggctggagtgcagtggcacaatctcagctcactgcaacctccacctcctgagttcaagtgattctcctacctcagcctccccaatagctaggattacaggcaagcaccaccatgcctggctgatttttttgtatttttttgtacagatggtgtttcaccatgttggccaggctggtctcgaactcctgacctcaggtgatctgccctcctcagcctcccaaagtgctgggattacatgcatgagccaccatgcccggccaatagtttcttttttgataggcagctcttaaagccctcagaatacatctctaatgatgaaatcatcaggcaacttgacaaagagtgaagaaattgaagggttctctcaatagcatcccaaggaggctgacccacaccctactgcctaccataggctggcttcatgtgctctagtgctgtgaataaaggaaaaaactaacatgttgaagcatttatttagtgccaggaggcaggtactttctcagataccctttttcttctcacataattccaggtcattggcagaatagagatgcaaaccaagaacttgggcagcaccaagatgtagatgctaaaactttaaacttgctggacaaaatgataggggactttgaaataattattcagacaatttaggcaagcaaacaaaagcaattaaaaattgggcatctggctgggcatggtggctcacacctgtaaccccagcactttgggaggccaaggagggtggattgcctgagctcaggagttctagaccaacctgggcaacatggtgaaacctagtctctactaaaaatacaaaaaattggccaggcatagtggcgtacctgtagttccagctacttgggaggctaaggtgggaggattgcttgagcctgggagatggagcttgcagtgacctgagactgtgccactgcactccatcctaggtgacagagtgacacccatctcagaaaaaaaaaatgggcatctggccaggtgtggttgctcatgcctataatcccaacactggaaggccaagtctggacaattctttgaagccaggagtttgagaccagcctgggcaacatagcgtgaccccatctctacaaaaaaattaaaattaaaattaaaaacagccagacatggttgtgagcacctgtagtcccacctactagagaggctaaggcaggaggatcatcaaaactgcagtgagctaagatcgcaccactgcactccagtctgggtgacagagtgagaccctgtctcaggaaaaaaggaggcatccaaaaaaatgttcccttagatccattttttgtctgacagagacaggagaggtgatgaaagggaatgtaagagtatttaagggattatttctttatggtagcagaaggacaaagacatgtttgaaaaatttttaatattgtataaaatgatgatattttcttagtggtcttgttgttgaatccagagattgtggtcatgtagttcataggtaatttatcagttattatttattttttaaagcttttatttatttatttatttattttagagatgaagtcttgcaatgttgcccaggctggcctagaattcccgggctcaactgatcctcctttctcagcctccctagtagctgggactataggcacacaccactgtgcctgtctaatttgtcaacttttaaatgagatcatctgcaagttcaaggaagttagataaagggtgataccacagaaaaaaaatgagatttttctctttaagatgaatattgaatttagaattccttaattaatattgaggatcacatgcgagctacagatagggaatattgagtatttaaagcattctgaatgacctgagtgttttccttctcatgcttattaaaaacatttaccacttacagctgaattggaatatagttctacataaattgttatttacacctgatacacagaaagaaatgtgtttccttatttatcatactattaatttgaatgtgctattctttttttaattgctttaaagtcaattggggaatcagattatgaatatctattttactgcttccacatttcctaagttaatcaaatacgacaagttagtgagcttgtggaatttacttgaatttcctaatcttttaactgagagggtattttcgacagcaaatattttgtagcatccatttgtcattttttaaatattcaaactagttttttttaaaataatgccaagtacacttagtgcctagtaaatgctggccactgttattgctgttatcattattcttttttgtttgtttgtttgagagggagtctcgctctgtcgcccaggctgaagtgcagtgacgtgatctcggctcactgcaagctccgcctcccgggttcacgcccttctccggcctcagcctcccgagtagctgggaatacaggcacccaccaccacgcccggctaattttttgtatttttttttagtagagacggggtttcatcgtgttagccaggatggtctcaatctcctgacctcgtgatccaccctcctcggcctcccaaagtgctgggattatggcagagaaatgtttgtttcaaaagtgtgttagtctctaaggaaatgaatacttccagactaaattctgtttatagtattatcattaataaataaactaaaacattacttctgtttcattgccccaatgtatattgtattaaaatgttcttttctgatcttctctaagttaaaaaaaaaaaaaagaaacaaagttgagtaaacaagctgagcaaactttgtgttgaaactttaatatgtccgaggaaaagaatcttgcattaagtccaatacagagagtctgataatttggtggagcagagagcctcatctgaggtggctttccgtgaacagcatctctgaggtgtcacctgctaccacattcactgtccaccctgggctttgcccctcaagcaccagggctcaggtctcttgttttgcctgtttctccctatagtctccctggcctgtgccttttagacaaaacagattaacatcacctttaagccgtcaatactgaacattctgtctttataaggcctgactcattaccaattttatttggtcaattttaccttccttgctttcaaaggaacaccatttgcctatgtcaagtgttctctttcttttatttttcccttccttctgtctttcccctccttccttccttccttcctccctccctcctctctcctctctttcttccttccttgcctccttccatccttccctccctctctctctttctttctttctttctctctctctctctttctttctttctctctctctgtctttctttctctctttctttctttccatcttcttttctttctatctttcttacttttgatgtagctgtcacgacctaatgaaaatactggcatgagtgatgccacctttagattctccaccttcctgttcctgtcctattcaccaacatgaattggtttgtggctgtaagtacttggtgggttattgctcatagattcagttgcatttttgctgagatagtgctgttaccaaaagcaggggtgctgcttgaagaagtaaacctaactctgaaaaatagagactctccagaaacatcataatcttaaggatggacatttgtggcctgttattgttacttcattctaggtgacagagtgaagtgagtgagggcaaaaatgactgcacacttatggaaagagggctgcctccaccacagacaggtagtgggaggtcccactcttccaggttgaacccaatatcctatcttctccttccgctcttggtacctgttgttgctattgtaaacacttccctcacctgggactgcatatagatgaaagattgctggggggtttcccaggatcttgggccagtgccaacaaatggcaaactttcaagtctagagatggtcctatggcatgactgggggacaccacttccttcaccagaacattcacatccttcccaaggtgccacgcccagttcttttgtccaacaataaactctgcgaagtggagtgaagtcaccacccaagccttagcctacctctgaccacagcctgtgactccacaaagataaatgaaaagaggaaagtcagtgatgttttctatactgtcagcagcaatctcacagcctcaatacattttctttcaaaagtttaatatgtaataactggcatttcttcttcattcctagttggttagactgcatcacatctgccatgccaaactattaagagtaatacaattcttactcttagtttattaagagtaaaaactattactcttaatagtttagcatgctattactcttttcttattttttaatttttttaattttttattttttgagacggagtctcgccctgttgcccaggctggagtggtgcagtggcacaatcttggctcactgcaacctctgcctcccaggttcaagcgattctcctgcctcagcctgccaagtaactgggattacaggtgcccaccaccatgcctggctaatttttttttttttttgtatttttagtgggcaaggggtttcaccatgttggtcaggttggtctcgaactcctgacctcaagcgacgcccccgcctcggcatcccaaagtgctgggattacaggcgtgaactgctgcacctggctgacgtgctattactcttacagcatctggacaatccctaacagtctgaaagctctataatgttgcaggtagtccaaaggccctatcccttattctagaacacaggctttatagcacaggctttggcaagtctgtaacagtctgaactcctccactgtattccacatactagggatcttttaagttgtcattatgtcctggcacaagcatttatcatatttctgggagcatgtagggttcaagatgcgagggcaagagagggctgagttgtttgttattaagctgacaggaaatggccaaggctcatgtgctactgcttgcagttgggcaaaagaggataaattaattgctttgtagaaattcctttctgcattctttagggaaaatttttccatgtgagctaaatgagtcaaagggggtggttttgggctcaacagctttgacattgtcccttcaaggaatgaaacaattaaagaaactgatctcctctgagaaaaagaccatttacaataacctatctactctacataaaatattcccagtagactcatcaaaacaagaccctctgataccacaccatactgggtttttccttattgggattcccccatgttttttctttaatgcttccccatgttttagaaacagatttgcttacccggaaccttccacactcaattccaaatttatcatagtactatcatttgggagtaaacaacatgtaaggggcctacacgggtggaaagcccattcaagaaactgaggatgatcaaatagtagagttgatagtatgtgtataatcccagggaggagtttcatgacggattagaaggtcaacactgcctgatgcagccgaaagatcacattaaaacaggacaggaaggaagtcctggctgtccagcaaaaggtctttagtggctatatcaagagaagcttttacagaagggtgagggtggtagcctgcgaacattggattaggagtgagagggactgaaggaagtagaaactcgagctcaggggaaggggagagaatgagcttgaggaaggccctctgatgaagggaaggctcttttctgatgccagtgagttgagcagacttataggaagcaaagaggagtctagggacagacagggattgtccaggtaatgtaggaaacatttgacaaggacagatctcgaataaaaacatgaatgcaatttctgtttcagatgtctcctttgcctgccccatcccacattctagaaaaatatttggtgcattaacagattttggacttcacagggcttcacttttattgtgcttaatatttgttccttggtgaaacacaaagagacaaactacacaaaaagagaatcatacttgatgaaaaaaatcaatgtttagaagttgctcttaaatcttttacccattgctaacatgggtatttggatgccatttggaacgtattccaggactacttatccatgaaaggattaatgatattggagccaggttcaaagtctcagcaacaagctaaaacctgctctttttagtagtcaggggcaaagcttagtatcctttcttctgaaagctttcgcatgctaagctttccattgccaagcccccgggaaggaaaataccagaagtttcactccgatagcagctttttctgagatgcgcctggtgataacattttccagtagggctatcttctgtctccttccttctctgtgtgtaccagtaaagccttgtacaagtctcttaacctttcttggcttcagtttccaaatttgtaaagtgaagataataatacctccctcatagagttgttgtgaggactacatgggctaacgatcagacagaaagcactcattaagtgtgactagcattgttaattgcagtaatagtagttctagtagcaggcttttccaggttataaggattaaagatacgctcatgttacctaagttaatggtgcattattttaagggtacaccaaaaagtaagaagaatgggaaactacttaaccagcacatggggtgcagaagcgagagcaattgtgttttctttttttttttttttttttgagatggagtcttgctctgttgcccaggatggagtgcagtggtgagatctcggctcactgcaacctctgccacctgggttcaagtgattctcctgcctcagcctcctgagtagctggggctacaggcatatgccaccatgcccggctaatttttgtacttttaacatagacgggggtctcaccatgttggtcaggttggtctcgaactcctgacctcatgattcactggcctcggcctcccaaagtgctgggattacaagcgtgagccaccgtgcccagccccaagggaattcttacagcctgacaggtttggaactctgagtctctctgtgtgtctgtgtctctgtcactccaccatatgtttagcagggttaattaatttgcccaagatcacacaattagtagatgattatgcaagatttgaaccagttgttattcattggaatatgattactgtgtaagttagcatgagaatattgaaaataaatgtcttgttagattcatttattttttaaaaaattcctatgtaggtcgggcacagtggctcacccctgtaatcccagcactttgggaggccgaggcgggcagatcacctgaggtcaggagttcaagagcagcctggccaacatggtgaaaccccatctctactaaaaatacaaaaaattagccgggcctggtgatgcatgcctgtagccccagctacttggtaggctgaggcaggagaattgcttgaacccgggaggtcgcagtgagccgagatcacaccactgcactccagcctgggcaacagagcaagactccatctcaaaaaaaaaaaaagtcctatgtatacttcttcacatcaatttaggcaggctttatttgttaacttttgttggtagccaacatgcatttaaactacttattattgtcctaatctaagaaaaactgagaaatggatgaagttggtcctagggtatcccaaagcacagagtgttttattctgtccttgggacagaggtttgattcaaaatgttttttcggaaactagccttgaacacctaattttattaatattctttttacactccatccctcctggaaaaggactggaccccaattcccaccattgcttttttgggacccattatcttccttagcttcctatgcatctacagggtagtctgggcttcacttcctcagtgtccctgtatgaaattaggtggatatagattagtctgatgtaggaatatcacactgtactaaggtttagtttgtatgttattctctcaagtaactgatctttcaatcgaactaaacacttcctatgtgctttaaggtggtgggaattacaagcatagcaagttatgattggtcacggatttctttcctctttaaatggtgacctactgcccattgtacctactcaaagcaactttctttaggaaaaaagaccacagtctactttcctaagcataaactcagttctcattccacctctaccacctgcaagatttgttaggcttaagcagtcccttaacttctttgagtgtttgttgccttgcctacttcattggaagtaaggctctggaacagggaaggtttgcctccataagactaaaagttatgctaatataagagactagcaaaatgggagacatattcagctctcttcttgtggggaataccttgcccttgaccaaaagccttgtcccagaaagagccgtgtgggtgttggctttgtgcccaacatgtggctcctctgccatgattgatggcttcatttaagaaacaggttttaggattttttcccctaaaatcttattcctgttaattatcatggatcaactttaccttagctcgtttaatacacagtcacctggtataaaagcatgtgaaaacccccagggatcgtaaccacatttatgcattgagaaaagagagtgaggccaagattttgagatgtgttcaaatgcaagaagcttttaaaatgcaaagtattctaaaactgttgaaagttgaagctaactgttgttcccttgttgaaggtaaaaagtaaagcatttttaggaaagcacttttccttatgtgtctaatatttgggaactgcataggagaacagtttaataggaaccctgatattgacagtaagatatattcttaatgtagtaaccagacccagggcagaatttgcaaacccatggtaggcatacaggtggctgaagaagaatcgggacagcaagatctcactgagatgcaattccattcctccatttgatacagattaagatttctgaaaaagaccatcctcctaaaccctcatggactctgcagataatatgaggccagaaaatgaataattcccaactcttgctatctcgttactggccagtgtgtctggcttcgctgagtgtgtgccttctgaagcgtaccctataattattcagcaggtatagtccagttcgtcctacttactttagcaagattacctttcttttatttttcctgtgaaaatccttctcttccttctttcctcctttgtctttcctctttgttaactttttaaatctaaagtgccttgaaaaacttgtttacatagtagtaagaaggaaaatgttgacttgtgctatcctgggaaccttgaccttcctgcattatggataaatcatttccctgcaggtggaagtggaaaattgcagatagaaccacattgactcacattctccttctacttccatttgagtgagcaccaagtatgcatcacgacttgagattataaagttggcttaatgatgagacaggtttctcagtcgggttttccattggctcgaagttcacaaggcagttgttgcttgtctcagagtgtccttaggtggactacatctgaacccttggcgttattataatgcagattctagctgtgctcaaaccaatgaatcagaatctcaggagggtggcgctcagaaatctgcatggttgatcagttctttagcagattcttatttttgtatgctaaagtttgagggtcaccactggagagattccagaacagggcctgcaagggaattgttcaaagtttgctcaagttaactttgttgttacagcattagcttgaatatcaggaggttttgtatttaagttctctaaaaaaagaaaaagaaaaaaagagaacagtctcaatatataaaaggaaaggttttcatatatgtgcccaattataagtatcttgagtattctaggagtctaaacagaatgtctttagatcatccttataacgatcctgagactcttttgactgttttgagttgaagacaggtaataagaaagaaatcaccaattaatgcagaaggaaataaatttctgtatataataatattcacatttgccatgtctcttttaaaaagtccaaataacaggcagagcgcggtggctcatgcctgtaatcccagcactttgggaggccaaggcgggcagatcacctgaggtcaggagtttgagatcagcctggccaacatggtgaaaccccatctctactaaaaatacaaaaattagccaggcgtggtggcacttgcctgttgtcccagctactcgagaggctaaggcagtattatcacttgaacccaggaggtggaggttgcagtgagccgagatcgcgccactgcactccagcctgggggatagagcaagactccatctccaaaaaaaaaaaaaaaaaaaaaaaaacagctcaaataactttaccgtacataactttaccatacatgtcctctagtctcttatcatttcttcatatgaagaataatttatactcattgatgtaaattttgctatattttatacaacaaacatagtattattttaatattgcacatagagaaaaatacctcttcccctcaaaattagaagggttggtatttttattcaggcttattgatttaaaatacctgcttgatccgtaattcaggccatacgatttcaccaaaacaaatatcctaatagttgtcatcttgaataactgtttagtgcacagaatgtagtctcatttattaagaagtgatttaagagattattacttctgcatctatcacactaacatgaccaactctttagtaagggaagagtaagggaacttattttatatctagatagaaattttattaaggatacagtattaggattcataggggaaatagtggatagatcacaagaacgaggctctttctgagccctgcaggaaagaatatttgcagaacaataaaggacatggtggcttcctggagaatgttggccgaagactgagccttacttctggaaaaggctcagtgctagagccaagtgagcatcgatatgccaatacaggcaagaaaatcctgcaagaggcagacttggttcttaggtcggaacaggctctgcttcagaacttgatccggtacccaattcgtttctgcttcagcttctttttctataaaatgagggtagtacttatcccatgagggagctgttatgaggataaatttggctttattgaatgtgcatgattcctggaacccataaagatgtcaaatttagaagcctcagagagatttcctttgctctgtgaataactaaatttggttagctggggtggggtctgggtacttttccttgtgaagaatttttccctcattctggtcatctcctcccctcctatagaggcaccatatatttttcttgtctcaggtacctatagtgataaaacaccctgagctgaaaggatcgctggatagggcagtctcaatacaaaagaatgtggcagaagctcaggcttcagtgcacatcagaatagaagcttcatgagggcagaggcttttgtctgctttcctcattgcagtatccccagaactttgagcaagtgcacactcgatgaatacttgaaagaataaatcaatgtcagacatctgggcttatgtctcatctttctactgttctcaactaagagattctcgtcattctacaactttcctgagcctgctctccttctccaaatattcacccttccaggcactgactccacctcccacatcagagctttttcttaaagtaaataacagtcaacaattaatagcttcataactttggaacagtgcagtgtctttggtttaagaagcattgtttccatcctccaaactaaaataaattttgagaaaagatggagatggtttgggactggggaagaagggaatggaagaagtgattatttgagggcacattaactatttgtacaaagtagaatatcttagttaaatttggctacatagcaagcaggtatcattaaatggatgtctgttagaatcttgattttcaaattaactagatagtcagcgttagttagactgagggagggtgattacagtcctatgtcactgagggagaatggtgaaagggcaagagaaggctggcaggtagagctggaatttttctgccagcaatagaccagtggttcccaaatgtaagcctgcaacagaatcatctggagggcttgttttttgtttgttgttgttgtttgtttgtttttggttttgtttttttgagacagagtctcactctgtcgacaggctggagtgcagtggcgcgatctcggctcactgcaccctcagccttccaggttcaagcgattctcctgcctcagcctcctgagtagctgggattacaggcatgtgccaccagcccagctaatttttgtatttttcgtagagacggggtttcaccatgttggccaggatggtcttgatcccttgacctcatgatctgcccacctcggcctcctaaagttctgggattacaggcgtgagccaccgcgcccagccaggagggcttgtgaaaacacagatagctgggcccatccctagagtttaggattcagtaggtctggcggaggcctgatagtctgcatttctagcttggccaggggatgttgatgttgctggtcccaggaccacattttgagaaccactgcaatagagagtgtgcatgaaaatacaacaacaattacctgatggtccttagcttagttcagttgtcccccacaggttgaagcagtgttcaagggcaaacaaaaactttctctctcagccacctccataagttccatagtttatttaacaaagcaaactcacaaagaaggaggaagttaggactgctccatttccccttatagcaaaggcatgtgtatttcacaactgcaatcagcttgaatagcagaggctggaaggctctccatgtctttactgaagtcacgtcactaagtcacacagacatgctgctaattcactgccttggccagcacatctgaaaataaatagcaccattataggccctttcatgaatatacagcatgtggcctctaaattggccaaggagctggctatgctgggacaaataacttagataaatcacaaatcagagtggagaaatgaggtgtttttaatcaacagcatccaacaatgtgtgttgagtttaactgaatccaggtagaggagggagtgggtgcaagagctcaaagtatgctgagaatagttttatttcaaaattccaggagacttagaaacaacatggtaatgatgaaaggagcctgaagagactctttttttttttttttttttttttgagatggagtcttgctctgttgcccaggctggggtacagtgtcacgatctcggcatactgcaacctctgcctcccgggttcaagcaattctcctgcctcagcctcccgagtatctgggattacagacatgtgccaccatgcccggataatttttgtatttttagtagagatggggtttcaccacgttggccaggctggtctcgaactcctgacctcaggtgatctgcccgccttggcctcccaaagtgttgggattacgggcgtgagccaccatatctggccctgaagagactcttaagatactttcataatagtttaaaaagctgtatgtgtgtttacaatttctgtcataaatctatggtaaccacagcacaaacattttagaaaaagaaaaaaaaaaacaactctcggttgagtgtggtggttcatgcctataatcccagcaatttgggaggctgaggcaggaggatcacctgcatccaggaatttgagaccagcttgggcaacatagcatgacccatctcgacataaaattaaaaattaggtatggtggtacatgcctgtagtcctggctactctcaggggactgaggtaggaggatctcgtaagtcctggagtttgaggctgcagtgagctgtgatctcgccactgcactcagcctgggtgacagagcaagaccctgtctcaaaaaagaaaaaaaattctattttcccacctctctaacataactgtgaatagtagtatttccttctagtttttaagtacactatttaaaaacatggaaggttttcaaataatgtacttagatttaaatgcatttttaagcttatacccatataataagcatagtaactaacagaatgttctttggagtcagatagtcttgggttcaaatcctccagacatttccagccctgagttttgcatttgttaaatagggatgataaacctggttcatagcattgctgtgtggattcactgaggtgctcatcaagtgctcagcacagagccctgtgtcatgtaagcactcagtaaatagtggcatcattttctgttttcacacacaaaaaatgagtcgaccttctgcaatcctaataatcagtaagttcttcttaatggccagaagtatacctatttttagtctatgcatttggcaaaatttcattccacaaattgtttggtggtcccaggagctgctttcaagatcttctctgaccagcttgtcgagagcttttgttatctgtgttttcctcaaagattagactcatgaaagatgtgtgaaagccaaaacaaaggaatgaccactggtgctcagagtgagagagattggtttagttgtttagccaggctatgtggctttgttcccagaccacagattataaccacaccattgtgggcaccacatatagccattttggtaaactagatatgggttgctagggacatgggcaagaaaccatgggtggggaggtgtggacctctcagccctgccctctcaagcctggccaacttcacatctgcaactgggactttgtttctgttccagacctgtttatccaactgccaacttgacagccacttggagtcctcatgagaacctcaaacttagtatgcccaaatgaaattttcagctcaccagaaggtaaccatactgtcttgagtcttacagttaccctgtaaacaaagggattaactttactagatagcaacttcctgcccataaagttaagaaaagagcccctcaatgcaaatgttggttttgcttatcaaataaatggattcttggttcttcaggatagttacagataacaatgggcagaatagccagtaaattcagtaactccttaaaattgttgaaagtattttgtgcactttctttatatcgctgcttagagtgttaattggtaaaatactctgaaggactaatacacaaacactttcacccagcaattccaattctaggactttattccacagatatatttatacatgtatgagttcacatgtacagttttctgaatttttttgtgctggcagaaaactagaaacaacagaaatgaatgaaagagactagttaagaaattattgcccagttttatagtagaatacatatgcagctgtaaaaaaagaatgagggaattattatgtatttatctattaagtgaataaagcaaaatgaagatcaccagcaaacagataaagaaattgtggtattcatacagtggaatactcctccataataaaaaggaatgaacaatgggtgaacactacaacatagacgactctcaagtactgtattcccatttgtgtaaataaaaatgtgggaaagaatgtatacatgtatttgcttataaactctatatgcacagaaggaaacacaagaaattattaccccgggaggcagagcttgtagtgagcggagatcgtgccactgcactccagcctgggcgacagagcaagactccgtctcaaaaaaaaaaaaaaaaagaaattattacctagattgtctatgcagagggaactgggtacctggcagacaggagtaggagggagacattgtacaatatgcttttttatactttttatatttaaaattgcaaaatatcttacatgctcaaaataaaaatagaatagcttatataactatgtctaaatattacatgtagttttcttctctggctattttctttttggtttttatataattttttaaaatccacttacttagcccaggcacataaatggaaagaaagatatgcttaaaattatgttatttgcaaaaacaaatatttagatgttttagagctagtatgtttttgttggtttctagtttagttctacatggcatcagactagctactctatatgatttctggacctttgcaatttgttaagatttgttttatggtcggggatatggtcaatatgtaaatgtttaatgtgtgcaagaagaatgtgtactctgaagttaggcatagtgttttctgtatatgtcaattagcacaagtctgtttatcatgttcaagctctgtgtatctctgggtttttttaatctgcatgatagaacagaagtatgtttgaaacttttattgtagttgtggatgtaatatttttcctctacttttgcagttcttgctttatatattttgagcctatattacttggtacatacatatttagaattgttgtgtcttcctggtggattgccctttgattatttaggaaatgtctctctcttcggtaatgcttcttaaagtccattttgtctgatagtactatagctacctcagctttcttttggctaggtttcataactttttaaattctttcactgtcagtctttttatgtccttatatttaaaatgtgtcaaaagaaagaaggagaaagaaagaaagaaagaaagaaagaaagaaagaaagacaccgcgatttacctatgttacaaacatgtatatgtaaccctaaacctaaaataaaagttaaatataaataaataaagtgtctcttcatgaaaactttcttagcatcattagtcattagggaaatgcaaattaaaaacacaatgagataccaccacatacaacatgtctagtataatggctaaaatgaaaaatactaacaacaccaagtattgttgaacatatggaaaaactggaacactgattatgggagtatacaaccatgttgtaaaacactttaactggtcatttacccaagaggaatgaaagaatgtatccatataaagatttgaacacaaatgtttacagcaactttatttgtaataggtaaaaactgaaaacaactcaaatgtccatagacagatgaatggatttaaaaaaaaccatgttatatccatacaaaggaatactcctctataataaaagggagtaaactactaatacacagtgcaatatagatggattgcaaaatgattctgttgaatggaagaagccagaccaaaaaaagagatatattgtatgattctatttatgtaaaattctcgaaaatgcaaaggatctacagtgacagaaagcaaattagtagttaccaggagacggagggtaaaaattaagaaggggcatgaagaaacttttttattgtagtaatggtctcatgggtctatacgtatgtcaaagcttatctaattgtatactttaaatatgtgcagttcattgccagctaattatactcaatctgtttttaaaagtaaaatgtgcttcttataagtaacaattttttaaaatgtagtctgatgacctttgtcttttaattagagaatttaatctgtttacatttaataactgatataggcagggcacggtggctcccgcctgtaatcccagcactttgggaggccgaggcgggtggatcacctgaggtcaggagttgaagaccagcctagccaacgtggtgaaaccccgtctttactaagaatacaaaaatgagccgggcgtggtggcaggtgcctgtagtctcagctactcaggaggctgaggctggagaatcgcttaaactggggaggcagaggttgcagtgagctgggattgcaccactgcacttcaacctgggtgacagagggagattccatctcaaaaggaaaaaaaaaaaacctgatatatttgggtataaatgttcaatcctactgtaggtttttttttccattttgcccacttgtttcttgttgctatagtcattacaacaatacatgtttgacttattagaatcctagtattaattagtacttttaccatttcccagatgatataatatgggctttaaaacacatgaaatccgtttacccctcaaaccttttgtgtatcattgatgttttaattctatgtatattttaaacttcacattattatcattattatatttatattgcacagtcactatcatttagatttacttatgtttacccttttggtgtatttcaatgctttcagcacttctgtgtttccctttgggattgcttttcttctgcctcaaaaactctccttactatttattttagtatggctctgctggtgataaattctctccatttttgtttatctggtaaaatatttttccttcattacttatgaagaatattttcactaggtagaaaattctagattgttagttattttatttcagcactttgaagatgtcattgcattggtttgtggatttcactttttcaattgagaagttaattttgttggttgcattattacactttgaagataatgtgtcttttccctggatgttttaaagatttttctctttgactttcagtagttctactatgatgtgtctaggtttgatttcctctgtattgattctgatgggcatttatagaactttatgaagctgcgtctggtatttttgccagccagtatttctttaaatattacttctgctccagtttcatctctcctcctcctttgggatccagcttacacaggttacatctgttactttatgactcaacacacttttctggaaagactctcttttctttaaacacaagacactaaatggttacaggtgttcttttaggtgattatgctgcttcatcagcagatggtgattatatcaagaaggaaacttatatgatgacatataaaagctggggagaggagatgtctctgaagacagtgagaaatccttctctagtcttgctgctggaaccctcaaacacttaagtcatctaataaacattctactgtcttcagaggaattttctcagtgaaagggatttgggacacccctgtgaggaagaaacataagttccatgccttccaaataaggggcaaacttttctttgtagtcatgtttccacctgttgaatccgttttatggaagttgtacagttatggcttgtctgtttatgagaagagatagagaatatgagaaacgataaaacctgaaataatccattgtgaggccacaggctgaagaacttacaaggaatttattctagactttatggctgaaaatatgtatgcatatatgtatatgagtgtatggagatacagttatggatagagatctatagatatatgtgtagatatatagatacataaagtttgctacagaaattcattttgtacacttttaaaagtgcactttactaaaagcatccaagaatgcatctcagaaaaagccttagatttcttttatgtggtcaactccaggaactactcactcttgagatagatgtgtgttttcagagcttatccatgccatgcacaatgatctaaccctttgatagctgcatcattcaaagtcagtttttctacatgcaacaaatttttaaaccttgatttttatttatttatttattttgagacaaagtctcgctcttgtcccccaggctggagtgcaatggcgtgatctcagctcactgcaacctccacctcccaggttcaagcgattctcctgcctcaacctcccgagtagctgggattacatgcacctgccaccaagccaggctaatttttgtatttttagtagagacggggtctcaccatgttggccaggctggtcttgaactcctgaccgcaggtgatccacccgccttggcctcccaaagtgctgggattacaggcttgagccaccgtgcccggcctaaaccttgatttttaaaaaaatactaccctgccctaaccttgtaacttaggaagtttggggagaggggtgtgtaacaacctttcactgcttatttgatgtaaatcatttctagtcctgaaacaatggctattttgcaaggtttaattatactgtgtgttgtggttgcatgcataggtacacccacaaatgtctgtcattaatacgtatcactagctttgtactttacactgtatttttggagtgttttacagtcgttcgttaccaagagtaaattatatatttgcttttctttaccccacccctttcactattgtttaaaacatgtcagattcaggaaaacctcaagagacccaaacctctttcaatacttatagacaaagtttttttttccttaaatcagttttaaaatccatccagccattttggctgccggccataccagcagataatgaaagaattttccttgagggtcaaaagccagggagaagccttccagggctgtttggtttcctagcacagctgctggagtagctcgtggtgctgattgatctgcttggagattcttgtgcatcttcacctgttagagctggaaagatgctcaggactatacagcccagcccttctggtttacatataatgaaactaaggcccaccttagtcaactaatgtgcttaaactcaagcaaatggcaaatggcaaaactcaggactctgtcaatgagttttcattctttttctttattcttctagacacatattttataaagaaatgaggcagcatgatgtttaaaatacttaaagtgagaatgagaaaaactgatgtctacatatcatgaaatggttaaaaagtttaacgtgcattgtcttctccattagaacttcttttacgaatttttttctcaaaatctggctcagaaatcttgttttaaaagctccctaaacattcctaggcagaattagtaacgccttcctctttgctaacaaggaactgtgcatattcctgtaatagaatacttaccatattatattgtaagtattaaattattcatctgccctcctcccacctacccactggatcaggcttcccaggaacagcaacagagagcccagcaatttgtgtgttctcagtgtggaatgaatgaatgaatgaatgaatgaatgaaccaaccattccttcacagtcttgcactatcagtgaatcttatgctttattgaacataaaaatcacctggaattgctgacttaaaatacagttttccaggctataccacaagagatgctaatacaggactggggtaggtccaggaattcgaatttttatctaagtagctgatgacttaatgcaaatgatccagcagccacactttgcaagctctacgctatgattagttgtggtttgtagtcccaattgtatatcataattatctgctgatctgaaaaaaacatagagcttctctacccactccttaccaccagtccatcaccaccattctgactccttagtcacaatgggtattgacattttaaataaatcccaaggctcccttccgggagaataaagaggataatatttataaactattttgagttccttagaagaagggtatcttagctcattaaggaaatattatcatgatataaatctaacatcatgaaacttatcttggacatgtcaaatttggtctaagaatcaaatgtagaggaaaataaaacccacacacagtacctgcatggaaacggaacctgtgcaaacacctgctttggctatgttcctttttgtggagacagatgtcccccttcactaggaccagggtagagatgaagaaggttgatttggacattggggtgctatatgttcttttgggactgaagttccatattaggaaacttaatagctgacatttacataacttttaaacatcccaagtagtacgctctgtctgcacactattttatatgtatgcaatttgtttgtttttgtttttgttttgagacagggtctcactttgtcacccaagctggagtgcagcaggcatgaacacagttcactgtagcctcaacctcccaggctcaagcaatcctcccacctcagccccctgagtagctgggactacaggcacacaccaccatacctggctaatttttgtattttttgtagagactgggtttcaccatgttgcccaggctggtctcaaactcccgagctcaagtgatccacctgctttggcctcccaaagtgctgggattacaggcatgagccactgtgcccagccatatggatttttttaaaattatgaacttacataacttcacaggagacagacctgaatgaggtagttattaaactactttctgactatggaaaggatttctgatccttgtagtatatttccacgtatattgttatactgttgtgtgtttgtatttagttgctcatactattttttactgtagcttactttatatgcaggtttccatgggtcaacctaatttatatttttgtcattttaaatggaaaaatgatatcccatatattttgtagtattatttgttcagtgttctttccaatgtgggatgctttggttatttctaattatttgctatcatgctatcatatacagaattcttatgttcatttctgctcaaaattatatttttgtttgtatgaattccacggtgtatatttcccaaagcgagatagttagataaaagagtaacagcagtttcatagttctggttgcatattacagtattactttccagacacacagagccaatatacaaccccaccaggggtgtgaggcatgctggttttcccacagcttgaccaacatgaaattttatcattccagcctatttctgctagcttaatatgtgtgtagggcctcactagagatattttattttgaagttcttcaaatgatatgaagcaattcttttccacgtggaatgattcactattttcattttaaggacaaaccattcgtttgtatttgacagttttgaagtgacaggtttaattgccttctgtataattgattctgtagggagagaaaataggagtgctattaggtattgggttaggctcaaagagtcaagaaagaagattagttgtgtagttctgaatttggaaacttgtatgtggacgactggaacagaaataccagttgaccctgtttaagaagggctagagagcaggaacattctgatttcatgatgacaaaaatactagagttttgacataggacaacagatcttgcttcaaaatgaaagcaagaccctatccttcctgcctctttgatcctctcacagtgccactttctttcctgaacattttcagatattcttatttcagatagaccactctggtgtataataggaccagttttagagtggccatgaagctaagacatgttatttgagagctcttaggggaagacctggacacagcagtcgcaggagaagtcagtcttatctgtaaaaaggtcagcttgatcacagaaaaaggctttggcttggttgtgttggccctccatggcttatgatcctctttcaagtaagcaaataaatgattgcagtgttggtttgagtcctgtggtgccaaacacaagacacattgttgctcatgcaatatagacctttgttttggacagtggtctaatctgctggtttttaaaacattggtgactgtccaacttataattaaaatcagtctatcaagcacttggagacaaaatctgaggttattctttcattcctagttgtcacactaattttttgccttcacttttgtctctgtagaatatttacacgtacacctatctatatctatttagatataatttatatactacaaaattcacccatgtgtacagttcagtgatttttaatgtattcacagtcatcactacaatcaatttcagaacattttcattactccaaacagaaaccccaaactcattagcagccactctccatttctctacaatatccccaaccttaggtgaccacaaatctactttctgtctgtatagattttgcaattctgggcatttcatataaagaatcatagaacatgtggtcttttggtttagcttatttcacttaggataatgtttccaaggttcatttatgttgtggtgtatataggtactcttttcctttttattgctgagtaattttccattgtgtggatatacaactttttgttaagtcattcatcagttgatggacgtttggattttttccattttttggcctttatgaataaggctgctacgaacattcatgtgtaagtttttgtggggaagtgtggttgtctttttttttttttttttttttgcaacagagtcttgctccgtcacccaggctggagtgcagtggagcaatctcagctcactgtgacctccgcctctcgggttcaagcaattgtcatgcctcagcctcccaagtagctgggattacaggcacacgccaccacacctggctaatttttttgtatttttagtagagatggggtttcaccatgttggccaggctggtcatgaactcctgacctcaagtgatctgcccacttcagccccccaaaatgctgggattacaggtgtgagccaccacacactgccagaagtatgttttcatttctcctgggtaaatacctttgagtggaattgctgggatacatgggagctctgcttaaatttttcaggaactgccagatggctttccaaaatggctgcaccattttatactcctaccaacagcatatgcgtgctccagtttctccacatccttgcaaacacttgttattgcccctctttcttgttatagccagcctagtggttgtgaaatggcaactcattgtgatttgatctgcatttcccatttccctcacggctagtagaatacttacttcctatcctagtttttccttatacttttaaaaaattaaataaagaaaacgctgtagaaaattaaggagcaaaatgtatgcttgcagctacagcttcctctggggtttcacacttccttgcctcatcatgtaacgggccaccactaggatgaaggtgctccagtcttattcttccaatcttctctccatttgtcattcagaatcctgggaaagagagacacttgtcctgccgtgagttatgtgcccactcttttgatttgtgtttctgcctagacagtgcacagcatgagtgttggcatcttgaaaggaaactggggtgctcctgagggagaatagatgccaaagttgggacaagagcccagtttcctgcctttctaggtgtaactcattgccaaggtcgggagcaaagcaaaccatgtaggaaacctcatcatgctgggtagttaataagtatgccctagcacacgttttcacagagaaaacataatacgcttcatttgtaatatttaagtattacatctaaagttacaatgtttaaaaatttatatatacccttgttggatacaaagcatgtttaaaatatgtgacctcatttgatcctcagtaatctctgttagtttctaattatattcagtagtggtattggtattgtatgttttggcctcattgtggtttaaatacacttttgtgaactagcctgagaatccaaccaccaacacaatgatgtaatgagaaaacgtgctctgagttccaaacaaatggctaacagataagtgctcagaagtcaacctttttgtaagctggggtatcactggccagcagtcacatgccagcaggtgtgagtagacagtggggaacaatttcctctcatgtgtatggctccctaaagtgttggctgagcattgtccacatgggtgatgcaaaggatcactgaactaggagcagttgggaaaaaatacaatcattgggaattcctgtagcatcgaaggtgcctacagggaggtagaagtattcatacaacagttctctggtgttctctgttgtagcaaccagtcagccaaaagggttcagctgcttgaaatgagaatggctggatcaaaatggcagctcaggatttaaaggattctagtcagataccagacatcctcacatagagaaaactctgaatggctgggggagaaggagtcaaatgccctggatctttttcttgggcctcaaagtcctccttctgtcatcatccttccagtattgggcaggacctgactgcaggcatcatggcctctgtgaacttctcaagggtatgtattatctgacaaaaactacgatgtccactaacaggccactgaaaaggtatcttagtcagttctgctcattgcccagccaaggcctacgttttataacatgatatcaaagattgcatctaaaattgtgatgatttcctaaaataatcatttcatttagatttttctattttaatccaaggtattcttcagcggaaataaggaaacagtttactctcccaccaaaccttggccagtaccatcgacagagcataagtacctctggcttcccctctcttcaactagtaagtatgagttccaggtttacttagcgattggtcaagtgcaaaagtgcccagggtatgtgtttgcctcctgttccttagatcttcctaccatcacctcacattctccagtcaccagatcctaactctgtgactgtgtctggacatcagacaatatccctctctctctctgccaaccggtacttagggtacataatagaacctctgggagctgtggttttgatgtctctagactaggtgggcttccaggtgactcagtctcatccaaattatggttcatatttgggggagaagggctagcccaaaaacttaccaccatttgtagtatgcatttttttggaaaagcatattccaaaatctgaaatgccaagttacagacctcctttttgtaaaataattttcttgctagtataatttacatataataaaattcacacattttaggtgtacaatttggtgaacttgggcaacttagagtcacttaacctttcctcagtcaagatatagaacacttcttttatcctaaagcgttccccagcgcgcttttacaatctcctctccccaggccacaccctccaactcacgcaatctctgactcacttctgtcaccataattttgctctatctggagcttcatatcctgttacagtatgtacaaaccttctttttttgagacagggtgtcagtctgtcacccagcctggagtacagaggtgtgatctcagctcactgcaacctcaacctcccaggatcagatgattctcctcccacctcatcctcccaagtagccgggactacaggcgcatgccaccacacctggctaatttttgtactttttgtagagacaggggtctcgctatgttgcccaggctggtcttgaactcctgggctcaagcgatcctcctgcctcagcctcccaaagtgctgggattacagtgagccactgcacctggccctaaaccttcatttttaaaacacatttcctcttaaattgaagattgcctacatttttatatcaatgccaattgttgagtgtgcctatatgtgttatattatttgagcactaaatgccagatgtgtgccaagtgagataaatctgacaaatgagatggtttgtaaaaccagcagtgaatattcacttcctctgtgagagagctccagccctcctgtactcacttcctcacacagcacagcagcactcttgctggttctgctgcttatcttgaagaggttaggttactttttgtttctacttattacttcgaaaccacttctgccttagaaattttgtaaccttccgctcagtttccggtaaccgccattttgtctcctgtaacaatttacgcgccgtgtaactgtgaatctttcaaaggtatgttttactggagtgatttctggttatttcagaaggataatttgtgtgttgcgtcattaatgaaatagtagtacgaaaaacctatagcatcttttactgcaggaggtaactttccatgccattttttcagaaaatctacttatgacttcagtggcttgctagactggcctttttatttgtacttttcctgtgtttcagaattgcagagtataataaaggcatgtcaagtgcatattgtgtccattttcaggtatattagataagctttacaccaagataaattagatatgcttattggtttaatttgtgctaatatatatttaattgaaaaatcaaaaaaatttttttaaattgactgaagttgtattccaaaacatgcaaaatttagtttaaaatagattggatacacttttaaattttaaacaaggtagagggtttagtgctttgcttttttaaaaagtaaatgaaggctgcagctttctgcagtagttgtcttgggaagtagtgtggacatcactcctaagagacgttaaggaagtttagctaacaggctttaaccctttctctccataccagcttttactcttttttttttttttttgagatggagtttagctcttgtcacgcaggctggagtgcaatggcaccatctcggctcatcgcaacctctgcctcctagttcaagcaattctcctgtagttcaagcaattctcctgcctcagcctcccgagtagctgggattacaggcatgcaccatcacatctggctaattttgtattttgagtagagacggggtttctccatgttggtagggctggtctctaactcctgacctcaggtgatccgcccgcctaggcctcccaaagtgctgggattacgagcatgagccaccatgcccggccaccagcttttactttaatgccacagccttaaattttctttcaggagaaattattttatgtaaagttacaaaggaaaataatgcttaatatctgtaagcattcgtttggtaagtttgctgcctcctcagtaagttttgatgaaagtgaattttgatgaattactaccttagccgggtagtgacgttaacatgtggcttagctgtccattttctaagatatcaagaaaccagcaacaataagtaaaattgttaaattatgcaagaatcacatgttcctacctgtcatcatttagtcttggttctatttgcatgtgaatatcctttagaatatattactcccagttattccgctttacttttctgaatctcttttcccatctcttgacttcaacttcagtatatggctcttgttccttctacctggagaacggaggcatgtggaagcccagaggattgaattcttttttttttcttttctttcttttctttttttttttttagatgaatagtctgcttaggaaatccatctccataatgtttacctggtatcgtgttgtaatgtcagaatgaagtggctgttcttccccttgagtcatcgtcccgaatgaaggttccccaaaagaaatcatcaacttatgtggtgatttccttttacctttaaaaaaaaatttcttttcatggaaagataatggaacatgtcggtaagattcatttctaggaaggcaaaggagtagtttatcatctaaagactctcaacctaaagctgttttagaaaactttccttaaaatgagaagccgtaggttttcgttgcattattttggctaattgaaaaataagaccaagtgcgttctgaccttcgtttctcttacctttatttttacaaccaccatttcaatggcccacttgctgatacaaatgattgtttaattttaaaaagcatttaattgaagtcaagttatttagaacctaatcatttacacgtctttgttgttgctgctgttttgcaagagtgaagagcttggagtcaggtgaatctgggatgaggtacagttgtcatttattagtcatgtaatttgtgacaagccacttaatctctctgaagacttcagtttcttcatttgtaaaattggcataataatgctgtccctagtagggaatatagaattatataatgggtcctttgtatatattggctagtattgctctcttacgatttggcactatggagacactgtgggagattaaaagaagatgatgaataaaaggtgacttcagctctgaagggctttatgatccatttgggagaacaggtaatgtagaatatactggcttcaaaagtggcaggtgtttagaagagaaaaggatacatgatgtgataggaggcaaaggcttgattgagaaggctgagaagacttagagtaagggttctcagccctgactggacattaaaattatctagggacaattcaatcagaattcctgggggtggggaccaagcatcagtattttaaagttccctggggactttaacttgaagcccaggttgagaatcatttaaacagctctgttatttatttatttaaaattttaatgtattttttgagatggagtctcgctctgtcacccaggctggagtgcagtggcgcaatcttggctcactgcaactcctgcctcccaggtccaagctattctcctgcctcagcctccccagtagctaggaatacaggcgtgcaccaccacaactggctaatttttgtacttttagtagagacagggtttcaccatgttggccaggctggtcacaaactcctgacctcaagtgatccacccacctcggcctcccaaagtgctgggattacaggcatgagccactgggcccggcctagttttactttttttttttgtaatggaatttccctctgtcacccaggctggagtgcagtgatgtgatttctgctctctgcaacctctgcctcctgcgttcaagtgattctcctgacttagcatcctgagtagctgggattacaggcagctgccgccatgtctggctaatttttgtatttttagtaaagacggggtttcgccatgttggccaggctggtcttgaacttctgacctcaggtgatccgcccgcctcggcctcccaaagtgctgggattacaggcttgagccactgcgctcggcccatttaaaaaaactttaaaggtagacgtattccaaatggggggaatatataaagaaaggtaacacttattttgccctgtgtgctttgaatttcagaaggtgtagtaagcaaagaccacttactaaccctacagatatatccttagaaaatacagtggtttctgtcataaatctgataaatcagatgagaggaagggtgtatgtttgatgttgatttttctttttgttttattggggtttttaaaaactataaatatcaggtctgatgactatgtgtataaacattttctaagtagataaaatattttcaaattttgcattttttagtatgaaggggatccatcatttgaagttggttttctagatgtgatgataaacttgtcccaggtctatttgacactcctaccaaaatcctttgtgaccagggctagaaggcagctgtggctagtaaataaccctgtgtgtagactcacttattggctttggcattctctattgccacagctgtgtgaatagattaaccagagaccctctggtgccagccacctattcaggcaaacaagtctataatcagtacctctgttaaaatgaaactgtaatatactattgtcttttcatttatttatttatttatttagagacagggccttgctctgtcgcccaggctggagtgcagtggtacaatcttggctcactacaacctccgcctcccaggctcaagcgattctcctgcctcagcctcccaagtaactgggaccacaggcgcaccattgcgcctggctaatttttgtattttttttgtagagacggagtttctccatgttgtccaggctggtcttgaactcctgagcttcagtgatctgcctgccttggcctcccaaagtgctgggattacaggtatgagtcattacacccggcctattttctgattgttcaaagtagaagccaggcacaatggctcatggctgtatgtaatcccaacaatttgggaggcagaggcaggaggatagcttgaagccaagagttcgaggccagcctaggcaacatagtgagaactcatctctacaacaaagttaaaaagaaaaattagccaggcatggtggcacatgcctttagtcccagctacttgcgaggctgaggcagaaggatcacttgaactcaggagttggaggctgcagtgagccatgattgagccacagtactctagcctgggcaacagagtgagaccctgtctcagaaaagaaaagagaagagaggagaagagaaagagagaagagaagagaagagaagagaagagaagacatacaaaagaagagtaacatacaagagaagagttaggagaccctgtctcagaggaaaggaggggaggggaggcgagaggacaagagaagaaagagttaggatctatgccctaaggaagtaaggaggatttgagactgtgtaggtggttaataaccttaagctacatattttatggagggaaaaatcctatttttaaaagtgagaatagaacaattttgaagtgaaatggaatgaattagctggaccataacggctctgactgaagaaaaggatgtaaaaagccacatcctggatatgtaccaaacaccatggttacatggcatgtttgtatatgtaacatttatttaaaaaaaaagtctcatagcttagaaggcatttatttttgttatgtgtataggcttctgtgcaataaagcagccttttttattttacagctcatgatgacttaaatggttaattgcctgataaatatggtcctcttttattcttctgattctgttgttcttttgcacttcatctttcaaggggttgggctattcttaggtttcactgattgcactggaagggacatgacggaaaatgaagatctcaagataattttcttgcaaattcacaatggaagataaaaggaaagagtggcaggcattctgcacacagagcagacgtttctttattgtcattgttcagcagaggaatcaactcagccttggtgaaactagagtgatgcccatggtggcatgtcagcatctccctcttagtggcatcagtgctagattgttgttgttggaagcaggagagtgtttagtccataaagtacagaacttcgatatcacagaagctagaagaactttactgccttcagcttcgtttaaagatagtagagagcttactcattcgttttagaaatatgtattgggtctctatgtcaggaactgctggcacagcagtgagattgaagatacaacagtgaatacaatagagggcctatcctcatagagtttgcctttcagaatgagggacagacgcagacaaatagaaaatgtcgattgtgtcagggagtattgagggctttgaagaatgaaatcgtgacccagaagagatgcttttagattggatcatccgtgaaggcctctatctagaaaggagacacttgggcagaattctgaatgaacttgacggacatctgaaggaaaaatattccagtcagaaggaacagtacgtgcaaagtccccaaaacttcaataagtgacgtgctccagaagcagcaaggaagcagaatgaggcctgaacagagtgggcagtaggaaatgcagtcatagagaaagcagggctgggtcacaggcctcagagactgtagaacattggctcctactctaagacaggaagctgctgtgagcattgaggttgggcgtggaaccatttgactttttatgaggatcactctggctgcagtgtggaaaatagactggacgagggagggcagttaggaagatgtcacggtaactcaggaaagcaataccggtgctttggacgagggtggtggcagaagagaaagtgagaagtattctggatatatttcagaagaaagtggataggattttctgatgggtgatatgtagagtgtaggagaaagagaagaagcaagattgactttaatgttttccacctgggcaattggtggactggaattgccacttgcagaagtgtggaggtatggaaggtatgggaagagcagattgccaggaaagttgagttagttttgaactcattgtgtttgagaggtctgttaaattatcaagtagtgatgttgaggtgtaattggaaaagtcaacctggaatttatggcagaagttgaggctgcagatataaacttgtaattttaaaaatgtatatttaaagccatgggagtgaatgagttcatttgagattgaatgcagattgagaagagatttagaattgaactccagggcactgcatagcaggaggaaaacctagtaaaagtggtatctgtaaaatagaggaacgaactgtcacaatttgcctggtactgaggattttctcagtacatgagactttaagagactgggacaccctgagacaattggttgccttccatgggaagaaagtatgtcaagagggagagagtgaacaactgtgtccaataaaccaggactgagcaaaaaccattgaatttggcatcatgaagtcttaggtgactttgacaaggcttgtctgttgtgaacagccaagtaaatgtgaggaccactctccaaaaggtaaagaaacatgcatgaggatacaggtgcgccagctggagacatcatgcctcttccccgtccccaccaggagtggcgtgaagcctccccagtgctgtaacgaggcagccaggtcctgtgtgactgcacatgtgacttggggcaagtcatttaacctctctgttttcactatcctatttgtgaaatattgtttagatttgtggtttgagtcagctatctgtatactacactgtgttaggagctatgtagattaattttcaacagatatggttctggggttgtaggaattttcaatttgagaacaaattgaatcttaccctttgtcaggagaaatagcctttgacatgtgttaggggcaagggaaatctcaaacttgcttaattttaaaaatgaatatttggttgtggataatttaagctttggtgatatttctaattattttttgtgtgtttctagtctactgaccagaagtctgaaaaaaacaactaaaaagaaagactgcataagccttcactagagaagtattgaaaattgcttgagggaagtgacggtttctttagcctagtgtctgtaggaccccagtgtagtgtttgttgaatgaatgaaaggaggcgtatcagtcaggttcactcagagaaacagaagctgtaggaaatccatatggatgtgtgtgaaggtattggcttgcctactgctggtgtgtggctaagcgagcttaaaagtccgcagggcagatagtcaggaaggaaatattcccaacagactgagctcccttgggcacaagctgaagcctggagtctgaactgccagagagcctctaccttcttagaaaaggcttcccactggctaagtcaggcccacccaggggaatctctcctttgattaacttaaagtcacctgtttagggactttaattacattggcaatagtcccttcacagaagcacctaaatgactgatgatgtaactgaaaaaatgtgtgtgtatgctacaaaatggctgcagtctcccttctgtcctccagctcttgcaggagaactctcttgtagctcaccctgtctgaaaacatactggaaaggaattcaaggaaatgtagttcagcctagccacgttgacacatcatgaagccgtcacaaaaggtaaagcctggtttaggagcatttgcatttgcagtcttaagtatttttgtcttatttttcaaaaggggttgggcacggtggctcacgcctgtaatcccaatactttgggaggccgaggtgagtagatcacttgaggccaggagtttgagaccagccaggccaacgtagtggaaccccgtctccactaaaatgacaacaattagccaggcgtggtggcgcatgcctgtaatcccagctattcaggaggctgaggcacaagaatttcttgaacccaggaggtggaggttgcagtgagccgagatcccgccactgcagtccagcaacggagtgagactctgtctcaaaaaaaaaaaaagtagttttggtttttaatttttgattttttcttatgttattacatataacgaatgatatgcatactctgaaaaatcatgacataaaggtgaccttgaaattactttgatgttcatttaaactagtctttggtctccactggctaggagaccacatatagcagaacagcagagaaagcaaaacagttaattttcatgtttggcttttgagcttccagggacccaagtcttgccttgaaccgatcttaggaaattcctcattccctacccgaccctgtttctaaactgcatccctgctgaaatgcaatgccactgtaactctctccaatatttgttttcttctttggcttaccactagatgtatgtatatatgtttgtgtgcctgtgtgtgtgtgtgtgtgtgtgtgttgactgcctcatagtaaagcctactcttgagattaagactcctgatagtttagagaacagaaatcttttttagttcctggttattacttgaatttgcaagaggaacaactgctaggaggcctagttaacagtagttagggtctccacccacttgccaagggcaagactagtttacaccacatttggaatgaccagtttcctcccactttagtttcagtgtagaaagagtaggggagacgaactattcaatgtcagcttgggtgtagtgccagaaccgtactcagtaatgctgtcattgctgttggtgcttaccagctcttcagtactggaatagcttcagacctcgagagtttatgactttatcatcaactgggtgtgttgcccttggcacattgccacacagtgcttaatgatgatatatgttctttatcaaattccccccaccaaataatggcattatttacgtgtgagaaagttgcacatttcaccacctcatggtttattagagtgcaattccgtgagaacaactgcctgtgatcctctgtatccccagtggccaactcaggagctcagtatgccctacccagtagatgctcagaacatcattgctgagtgaggaagtcagccatcattttctccctggatagtctctcctgtagataacaggggccgttatcagccaggtttttcatcatttgtggctttgaatttcagggacatgacaagtttgctttttgtttcgttttgttttttttttttttttggttttctagagacagggtcttcctgtcactcaggctggagtgcagtgatgtgatcacagctcactgcagcctcgaactcctgggctcagtgtttctcccatctcagcctttggagtagccagcagtataggtggtgtaccaccacacccatctaactttaaaaaaaaaaaaattgtaaagacagagtctcacttttttgcccaggctggtctcatactcctggctcaagcaatcctcctgcgttggcctcccgaagtgctgggactgcaggtgtgagccaccttgcctatccaacatgacaagtattattctctggcaggaagtgaaattttttctcactgatgattgcacacaaatgtcatatctccatgaggcttctactcactagttttacggctcatgtcaccttgcttcaaactatgcttcagtataattttgaagtgtatatttccattgcctctccttgagtaattgatattcttcacaataagtttacatttattatcacttttatttacttactattattactctgagcagccaatcttatgagaagctcagagtggaacgtgtgggtcctggtaaatatattatttgactcacttccaaacacacttaatattgcctggtgttttgattatttcaaaatatacagatttcttgaaaggcctgcaaaaggaaacaatcaaaattatagcggttaagaatgtgagtctgccttggtttgaattccagatgggccagtccctagctgtgtaatcatgggaaaattattaaatctctagcctcgctttcttcatctgtaaaatgagcatacaggctgagcatccctagtccgaaaatgcaaaattcaaaatgctccaaaatctgaaactttttttgtgcctccatgacgccacaagtggaaaattccacacctgacctcacgtgataggtcacagtcaaaacattgtttcatacacacaatacttttttttatttgtataagtttaagtggtacaagtgcagttttgctacatgaatatactgcatagtggtaaagtctggacttttagtgtctccatcacccaaatagcatccattgtattcattcaggaatctagcatccctcaccccctcccatcttcccacctctccaagcctttcatgtctagcattctgtgtccatgtgtacacattatttagctcccacttctaaatgaaaacatgtgatatctgtctttctgtttctgagttttttcacttaagataatggcctccagttccatccacgttgctgcaagagacatgatttcattctttgttatgactgaatagaattattcaggcacaaaattattaaaaatattgtttaaaattaccttcaggctatgtgtataaggtgtatatgaaacataaatgaatttaatgtttacatttgggttccatcccgtggatgtctcattttgtatatgtaaatatgacatgatatgaaaaattcaaaactctgaaacaccaattgaactcaatttgcagtaagaatgcatacctcacagggttatagtgaggattgaatgagacaatcctagtccaatttctttgcacatagtaatgctcaataattattacttaaatgggtataaactttatagtaatgaggttggggctggaaaaaatgcagtttcataatttcctatagaagtcattcaatcctgactctaaactctgtattccatgtggtggttgggtggcgtgggagagtcctctttatcctgtggggttggtcctatggaggtgtctgtggcagattggcagatgcatttgtcttgtgcatagatggtgtctgttgtttcctctggcagagttcaccagtgtcctaatgcaaacttagtcctcatctggctcctgcacaggctgatctctggctcctttagcccctcatggttcctgttgtttcattttcagagggacccttgtaaggactatagtcctctcttcagctgaccttcaggtccccagtcagaaccaagggaaccgactctgtcccttctcatagcacctgaaaaccccgggaaacgaggggaatgctttgctctcagctactgaggttgtcctgtcaccttctcttctgccctcctttgccatggcataggataatgtaagtcagcaatctcattactcggtatatagccagaggaatataaatcattctaccataaagacacacgcgtgtgaatgtttattgcaacactattcacaatagcaaagacatggaatcaacttaaatgcccatcaatgacagattggatgcagaaaatgtggtacatatacaccatggaatactatgcagccataaaaataatgagatcatgccttttgtgggaacatggatggaactggaggctattatcctttgcaaactaacgcagaaatagaaaaccaaatgctgcatgttctcacttataagtgggagctaaatgatgagaacttaccaacacaaagaaaagaacaacagacactgtggcctacttgtgggtgaagggtggtaagagggagaggagcagaaaagataactatgtggtcctgggcttaatacctgggtgataaaataattgtacaacaaacccccatgacatgactttagctatgtaacaaaccttcacatgtacccccaaacctaaaagttaaaaaaaaaatcccagacaggaagtagggcatattttgcctaatttgcagcttcatcctcactccctaacttacgccactcatgtctcctccatcatcagggacagcaagagtggggaggggacgaggcctgccacatctccattctctgatcttatttcctcttgcctcttcaacagcgctttgtctctcctctccagcttgaagcccttactctggtatgtgatttcaaagcgatgaaaaactggtttcgttagtacttcccttggatctgcccttgtctcccatcaaggcagtgcaagtaaagaatccaagatatttgttttgttggtccactggagggtagagatagagaaaaacagtaacttccccaccacccccaacctcccttgggctgatgactccaaagactgccataaatgaacacttcatagagctgctattaatatgacacaaatctacttgatctaagggattcttttactttcttagggtggtcattcctaagtctttggatttcacagaaaagaaaatatattttaattgaggactgacaaaggttgccaactttttatcaattataagaattgtttttataattaccatcaatttctattatttcttttactccccctctttccaactgtggaaggtaaaattgaagagcaaagaacacttatttcaaagtgagtaaatttagctatatgaaaactcagcagattgccctgagtttccttgcgtagctgcagtccagtggaaatttcttccagaccagcaccagtcgccccagtgacatttagaaatcactgccctggattgtttcagccaccgaaacactcggtgttcactgtcagctatgattatatatgaagtgctttcgagaaccaatgtatagcataacttaggccaaaagaaacactgtgcctaaacactcagccaaggagtgttgagtttgcctggatttctggaaaattgtctccgttccctagttcactgtatttgggtaaacaaaacatggcctcggagagcctttgcgggagaaattataaaaattcagcaaagctttgtgatctcattttggatctcctcaggattcctcatcaagttgcaattaaggagagaaaaattccgccttggggtgggattttaattactcatcatgttatgacttgactttctgtgctgcatttttttccatatcactacttctgtgtttgacagctcctccaaagagtcgctccgttttatgccaggagcgaagtacttactaagtcaaaggaaagcaaggcaaacatctactattgcctttgtgcttttaccagaaaactgggtgagaacctccttttccttttccctgcccctccagcctcagttttatgaccctgtggagccagtggactttgaaggacttctgatgacacacctgaacagcctggatgtgcagcttgcccaggagctcggggacttcactgatgacgacttggacgtggtgttcacgccaaaggaatgtaggactttgcagccctctttgccggaggaagggtaaatagttttctaaaatgtagatgtgattgggattgtcatgattgttttcaataagtgggtaggggagatgccttcaatctgaacttaaaaataaaataaaattactcaatccattcaaatgtgtgggacagctatatgatatcatcatgtaagtatagatagtttttaaattagtttggccagagattttgaaaagctatgtgaagactaagccagtgcaagggatgcaggaggaccaaatgaaatgctcaagaggaggttaaaagtgcaggctctggagccagaccacctggctgccagctcagtgaccttggctgtcacatgacctcccaaatcctcggtttctccatttgtaaaaatgtcaagatttttaataataattactgaaatgccaccatccagaagcattttaattgcttacagttatgagactggatcaagttagaaacataaggtaaacccacatttattgagcatctactatgttctgggtactgagataaaaagatgaataagtcaaagtccctcctttaaagaaagtgtcatgcagtgctaaaacagtggggagagctctgtagaataaatatgtgaatagctaattagggcttgagtttctatagttggctcttctatatgtttataggcttgggcattagtttttggcatcaaactaactgtggaattgtagctaaatgaaacgcctgttgcttctaaaatgtaaaaaaaaatgtctctttggaggtttaggataaacttttatttacatttattttaaaagccaaattaagattcatatcctcctggacaggttccatcttctcatcttccccagaaggtcccagaaagaagatcctgacacacagcccctgccctctttactctgagatattctagttctattttggattttatttcatcacagtttaaggaggttggatgataatgggctggtattattgtgaaccgttgctctcttgttcagacagtcctcactcacataggagaactgaccatatgtgtagctctgatgttttaaaaatacacacttcccaggaaagaaaaacattgtcatttttgggaaacatactcccccattttcagtccatttattcaggtatgactttagtataagttaacacctactatttcatctttagtgaagaatcatttaatttattcctttatgtaaaatttatggatgtttccaaatatggtcagaatcttggaaaaagctgtttaaaatgcttacagtagccagtcaccgcagcttgttcctgtggtcccagctacttgggaggctgaggcaagaggatcacttgagcccaggaatttgagttcagcctgggtaaaatagtgagaccctgtttcttacaaaacaaaaacaaaaaacagtacaatgaatttagaggaaggaggaggtttttttttttttgaaatttgataaggaagataatttctttacttagcatcagttttttagtatactgttgccttgtcaaaagaatttataggtaacatacctgtctgatgtctttaagacagcctctactatttcagttgttgccaaaaagtcttctgtataattaaggcaggggaaggtatcatcatcacaccagagtaaacaatagctgactcctgttgaacaacctgtgcctagcccagaactttatgttgagctgtgatggcgtggtagtgaaaaacatgaacgctacaggtgagctgcctggattcaggtccctgctccaccacttgctgtgtgacttggaacaagatccttaccatctcatttttctgcaaagtgagaataatagtaatgcctgccctatggtgctgattgagaattaactgaattaatacatataaagtgattgcctcagtgcataatgcacagtaaatgctacctaagtgtaaactattaatatcatatatgcgtcttattgtgtgccaggcagtcttctaagcactttgcacactaaccgatttaatcttcatcaaagctgtctactaaaaggggcactcttactactctaacagctttaaggagaggaaactgaggcacagaagggttgagtgactggcttatggtcacatagctataagcgatgaagctgggatttgggcaattagggcccagagactgcatgtgtaacctttacaatattttatctaatactaacagcatgtctctgttcttacctccttatcacagatgagaaaattaaggcttgtagcatttaagcctgtttatttctggtactaatgcatttgcaacaatagcaaaaagctttgctacaattgttatttttgatttcaagactctgaagcacttgaagagtattgctcatggtgcattccttaagtagacatgacaggaaccaactgaattaatgatcaccaacaaaagccagtgtttgcaatttcatcaaagcataagacaactgttctttttcctggctttcaaaaaggagaacacgcgtgtcctaacaaggttacacatgcataaaaaatatgtccaaattaccctgtcagagataggtatttatacttattttccttgttttgtattcgaatacagctagttctacctgtcttgtgtctgaatgccttcggggatagttataatttaacatgattctgtataataaagaaaacccacaaagcaaaaaaatgccaacatgtttgtctcatcaaagtaaaaatgtttattgccccaggaatacttcagacatttggaatgattgggcaagaacatcctaagcattctcactgataaggatttaaattcgtgtcatgttccttgctcatgattaggggttgttttgttgttttacccagtaataacgtgtttatttcattttctacctcattagggttgaactggaccctcatgtcagggactgtgttcagacctacatccgtgagtggctaatcgtgaaccggaagtaagttactttttttccactttttgtatataaatattaattttatattgctagtttttaaatatttcttaatactttgaacagttctaggtttacagaaaaattgcatggcaaatagagttctcatgtatgccttccttatccccactccatatcacacacacagttccccctattatgaacatctcactttagtgtggtacatttgttacagtagctgagccaatatggatatgttgttattaactaaagaccatagtttacattaatgtttactttttgtgttgtatattctatgggttttgacaaatgtgtaatgacatgtatatgcctttacagtatcatacagaattgtttcactgccctaaaaatcctctgtgttccacctgttcatcctccctccctggcaaccactttccttttttactgtctccataattccaccttgttcttcaatgtctttttgtggcttgatagctcattttttttattgctgaataatctttcattgcatggctgtaccattgtttatttatccattaacttactgagaaagaaagttctattttaaacataaagaatagactgcaagcttgcccaacccctagcccgtgggcaacatggagcccaggatggctttgaatgtggcccaacacaaattcataaactttcttaaaacattatgaggtttttttttttgcgatttttttaaagctcattagctattgttagtgttagtgtatttgatatttggcctgagataattcttcttccagtatggcccagggaagccaaaagtttgggcacctggaatagagcctttttgttgtcttctaattctgatgaattcccagggggaaaaattaagtgaattgaaacctggcctcagcttcagaggtggcattcgagtttatgaccaagaaataaattacttgctggccttccagtaagggatctttctctcctggattaatcaaaccttctgtgacattgttctgagctttttctctccatgccatggacctggacagcactctctcatgagaaacatctatgcacattgaaattctcagcctgcatgggtgtacctgttggggagtgagatgtggactctctacagattagggcacaccccactagagacacgtcacagaacctttgacaagacattagtagtttaaaattctgatagcctcactcctcctatacctcagtaagaattactattctatggggtaaatgatgaaagactttgaggattgggttttatctagctcctggaagggtgccattgagtttgtgctgaggttttctggagtaatgtcaatatgcacacattttcagcagcagaaaaagagaaagcattcattattaaaagttattaagagaaagttagatgccaatccatcatctgttctaaaatgaatggaaaacaaagtttgctgggcagtcagataaaattatggtttgctgataataaataaaagatttcagaacaagttgttctcaagtttttaaatgctatcattagaggtactttctggacattaaagatctaaaaaaaatctgagaaggaacaaatagaaagatccattttgatacatttggttttcagatttattttctatttcgggcttgtccactttttcatttctcatggcaatgcacgcttcttggagtagtgatttttcttgatcttgcacaaatgtaagagaaaaaaatgactctttttggaatactcgttgaaattttagaaataattatgaaacacaaatcactcagtttcactctagacagataatcatcatgaacatttgatgtctgtcctttgaatagtgttgggtttttttggtatatatttgcgtgaaaactaaataagattataatatcatttttgtaacatgcattttcagttttcacagtaaagagtgattctcttcctttgctattaaatatgcttcctcaatacaatgattgatgattgcataatatatttataccaaaatttatttaaccaattttaatatttaggtgattccttccttttcagtgttgtgcttaaaatgcaaaaacatccttctcaggaaaaatttgtacatatttatgatttttttctttggaattaattcctacaagaggaatttctatgtcaaaggatatgcacaaatttaaagatttggaatactagatcaaacattatgccgggcgcagtggctcacatttataatcttactcagcactttgggaggttgaggtaggaggatcccttgaacccaggagttcaagaccagcctaggcaatatacagagaccccacctctaaaaaaattttttaaaaaattaactggatatgatgacatgcacctgtagtcctagctactcgggaggctgaggcaggaggatcacttgagcccaggaggtcaaggctgtagtgagtgacgattgcaccactgcacaccagcccaggcaacagaggaagaccctatctcaaaaaaaaaaaaaaaaaaaaagccaggcacggtgctcatgcctgtaatcccagcactttgggaggccaagacgggtggatcacctgaggttgggagtttgagaccagcctgaccaacatggagaaacccagtctctactaaaaatacaaaattaaccgggcatggtggtgcatgtctgtaatcccagctacttgggaggctgaggcaggagaatcacttgatcctctaaaaatagctaaactgggaggcagaggttgtggtgagccaagatcgcgccattgcactccagcctgggcaacaagagtgaaactccgtctcaaaaaaaaaaaaaaaaaaaaaaaaaagattattgacactacatgcatgaatcctcaagaatattagatgttataatttatcaacatttccaattttatttgataaaaggttgtcttttttttcattttcttttactattagattaggcatctttcttctatatatttcttggccattttttatttttcctggtgctctgcttattcgtgaaatttgtgcatccctattaatgtatttgtctagtctgatttatttttataagcacttttttggtaaagatattaagccttgtctaccatgtattaaaaatgtcttccccagtatgccttttgtcttttaaagttgtttttaattttcaacattcagaattatttatgtcattaaatctatattaatatttttccttatgtttaattttggcatcatgcttaaaatttgattcacaaacttattattattttctaagagtatgggattaaagcattaatccagatcattagccacttgactgttgcttctgttcccttatgtgtctccatttgtttttatcttttctacagaagcaatggttacccatatatttattatatgcaagtttttgcatcttgttcccctaaaaaagaaaggaatatgtgttttaattttatgtttggcaacattctagggatgggattaccattggcccagttctctgcacccctgtgtaatggagcagttcccttcttaacggtcacctagtggacagggagaagtgtacaacttcagaactcattgtcagtttctggcaagctttcttgtagaaaagttgcatctctttctatccctctgcctcattctcttgcactctgaatctaacactctgcccatgaaaactaaaattcctagcacacactcctcccagggatcattctgtctctatatgcacctgtcgtattttatctgtggggagaatccagtacactattgccagatgtccttcatctcccaacctcacacagtacatttttagcttattgttttctgtgagttgtatctgtattgttttagaatgatggtagaaggagaaggacaaggagaaggtggtgattcatataaatgaaaccagctggaagctgtgatgctttcatagataagccactattatgaagaaggagacttcagatttctgtatagacactgaccagggactcgtgggcaggaaggtgtgcaacaccttcttatctttattcagtgagttcccctttggggagacaaagtttggtacatccttctctttccagctccatctgatccacagaggttctgtccagattcaggcattaagttatctcttcatttggatgagtttccagtttttctgtgtcttcataagtggtttactagaaagtcggaggaggatgcaataggggttgctggccatttgttaattagtgattaattatttagctctcctttaattggttatgtgccaaatcatgtatgattgttttgaaagaaatcaagtaatatggaggtgcattaaggaaaaggcaaatctcatgcctcactacttaccagtgtcctacccttcccttaactcactcttcactgcgtaaagcccagctgtgtagcttccagatcttttcataccctcacaaaaaatatttgtctatttatatttttcacataaagatatatgtattaatgtatgtacttatatattacaaacatttctttaaaataactgtccatgtcagagctatatcccattctactgaaatgctgcctagtattcaaagggtgaaggaatgtgtcctaagttactgaaactaaatgaccattttggttgtcaccatttttcataattgcaaataatactgaaacaaacatatctgcacatttgccccatacatgtgtgtgaatatttctgagggtagaaatgaagccagtgtacatggtatgctctgataggtactgccaaattcttctccagaaaagtcgtgctgtttcattccattaccaactgggcattaaactggcgtgttcccatattcttgccagtgctggatattatttattaaaataaaatttcagttcctccagtcttcttttagttattattttaatctggaagctattacacctactttctgaatacagtttcctatcaccaagtttcctttccttatgtgttctaaaatcccagttaaatatgcacttaaccatacaaccgtaagtcccactcttgagtatttacataaaacctatgtgcaaatacagcagtttagcagttttatttgtaattgccaagactgcatagcagttttatttgtaattgccaaaaactggaagaaaacccagattgtactcagttgggtagtagataaacaaactctggtaaatccatacaatggaatactactcagcagtgaaatggaacaaacaattgatatatacaacaacatggatgaatctcagatacagtatgctaagtgaaagaagccagacaaaggccgggcatggtggctcatgcctgtaatcccagcactttgggaggctgaggcaggtggatcacttgaggtcaggagttccagaccagcctgaccaacatggtgaaaccccgtctctactaaaactacaaaaattagctgggcgtggtggcacgtgcctgtagtcccagttactcaggaggctgaggcaggagaatcgcttgaacctgggaggcggaggttgcagtgagctgagatcatgccattgtactccagcctgggcaacaaagtgagattctgtcttaaaaaaaaaaaaagaagaagaacccagacaaaaaagataactgcatgattccatgtatctgacattctggaaaagatgaagctacagggatggaaaacaggtccatggttcccagggtctgggagtggggaagagggctgactacaaaaggacacgggagtgccctttgcgtggtgctgggactgtagtgcccatgatgtaaaatctgccttggaccattacattagaagaaatcaattccagttatcccaatattccctccaagtgaaatactttggtagcatatataataataattcaataagtattagctattatatttattaagtagtacctatcagaaaacatacttatattagcatgtcaaaggaatgaacacaaaattctctcccatatattgaacgcaccatggaggggggacctgccttcctctggaggaccatacttagtgaagccactttgccttataaggacatgcctttgttatccagaaccaagcagtcaaacactgatttagttagctcctttatttctcagttatctcctgctgatattacatttctccataatatctagagataggcttttatgtccttgctagctgtggtaatggttttgaatcccacttagggggcagaggagtagagtaatggccacttgtgttccctcccaccctcatcattctacagggcatttgccactcaagtactgtaattgagacatttaaatcatacaaataatgctgcccatgaaggatagaggaaatttttagatttccttttaaacctaacagagaaagattaagttacataaaaatgtaaaatacatgatctccagtacattgaaggaaatgtattttcttacttgaaatgtttgtgttacttagactggaagatttattaaatgatttccattctatcactcatgtttacagcaccaaatttggtgtccttgttctaaaaacaatagtacttttctccccatgacttttgaaaatgattactggtttactgattagcatggcgccatgtttgcttgtttgtccaaccttttatctgcatattttgataatgttgtgtggattaatatttgatgacatcctttgggtgatattaacgattttaagctttatttcttctgtcattttctctaaatgaaccaaagagggataaacttcagaatgtttttgatgcctggtggagagctgaactcttaagaaattaaacttgtttacatactatatttattcttgccgcagagacagtgaaacatttcatgagtgttatgggcagcatcataaaagcctttagactttgtttttcatctggggtgattaaggtaattctgaaggaaggttgagctcaaggagagctgagatatcaaggaatggggtatcatctgttttattactccatattttactcccagtgaagtggtaaacaattaaaattcaaacacatcagtgcatataattcagttactcccagaacaccataaaaatgtttccctgatcaataattgcttattatgacatgcatttgttgtgctagctgtcaaggtgcttagctatttgctttctaaaagtatgaaaagcacgcccggctcatcagcctatgtggtaacaaagagcaatccagctgtggatgtcacagagccactcttgacctgttgtgcatagactccctccccacaaatccaaacccactaagactctccaggctctgttaacacacaccagcctggttcagcttggatgccctcctcacaccatgtgggttctgattttccatgccaggcagtccatcttaaatggatgcatcctcaccgtgtttgggcttcaacttcctattctggacctcctcggctactccctaccccaaggcatggagggctgccttgttctgatgcaccttatgattttagcaccaaattgtacaggaagggagagaagggaaaggagaaagaagatgtgaaaggaaagagagggtagggaagaggaaaaagaagatgaggaacacgtattattttctaatcctcacaataggtcctcaaaatgagcaacatttccccctatttcatacttgaggaagctgtgactcagagagactaaggcacttgcccaaggtctcttagtacattaaggagccagcgtctgcacccagttccttctgactctagagcctggattctgctggctgcaccacactgtctttaaagagaacactctcaaaacgcgcttggtctttggattgtctcaaatgtgttagaatagtgttttaagaaaaggaatgcagatctcctgggaagcaataggtcgagttcatttcatgagaatcatttttctagccattggcctacttccccatttttctcctgtctgcatctaggtgcaacaggaacttggctttatttgactccattgccagggtggggtaatgaagctgggactctcttgtagccagcggcagtgagccagcagtctcactgcctacccagtgatggttccttctgtggccagcacttctggaatgagtcatctttacatgtttgccaacccttgtcctctcctccccagccaggttcacccttgctgctgtcaaggagctttgagactttctgagatttttaaatggggaagtagatgttaaacctagtatgaggaagagagggaaagtttgctctggtttcaaacacacagtcatagaagatgctagtcttaatgctttccatagcaaaaaccctgaaggcttagagtgtacacattgtgaactgaacttttaacattattgtgtaactcatttgttaatgcctatttgtcattgactgtggggtccatgtgaaaaactcccacaaacactctaacaaaatggaagacagaaaagaaagcaagcatcatttgtgtacaatagccaaagaacaatagccaaataaatttgatggtctcaaaagttaagcatcttttgaagagaaaatttgattttagggccaggtggggtagctcatgcctgtaatcgcagcactttgggaggcagaggcgggtggatcacctgaggtcaggagttcgagaccagcctggccaacacggcaaaaccccgtctctactaaaaatacaaaaattagctgggtacggtggcgcatgcctgtgatcccagctacttaagaggctgagacaggagaattgcttcaactcgggaggcggaggttgcagtgagccaagatcatgccgctgtactccagcctgggtgaaggagccagactctgtctccaaaaacaaaaacaaacagaaaaaagaattgattttgattttttcagatacagtgcatgaactttttatcataaaatattaaagctggggaaaatatcttagaattcacctcatgttcatgctttaccctgtgaagaaacagaggcacagagagaaataacttgaggataatggaaacaagcacacatctgtaagtgtgtgtgtgtgtgtgtgtgtgtgtgtgtgtgtgtcagagagagagagagagatgttcctttgtaagtaaacactcttggaaatagccgcattttattataacacaaaaagtaatgctaaagctgatatagttctggttgctaagcttcacacacaaaaggtctttaggtagctgcttcctaatttttatttctgtggcccaaaagtctccttgtaaaccttcgtgtcatgtcatactaaacctttgacatcaataccctttaaaatgtacaagtccttaaaaaaaaaaaaaaggcaaagggcaaatactaatgtgggaaatttgaattttaattaactgtttgtttcaatgttaggataaattaatgttagataaattctttggtaatttttccccctaaaattggatttttcaagaaacatcactggttcagtatattgttatttggggtagcataattttaggcgataacttaatatttgcatatatttgtcactactttgagttggtttttgtcccctgacccccagccaggatgttagatcacacagatttttttttctttgagcccttagggagagtccaaaacagtcacttcatgtactaggaaagtttacccagtcagcacacacagatatgttgttgcctacatttatatttgtgagagtgactgttaagaaactagcaggtttataaaatccgtgtgagaatttctctcaaataactgttaatggacaatccagcaatcctcccatctcaggctcccaagtagctgagactacaggcaggtggcaccatactcggctaattttttgtgttttttgtagagatgcggtttcaccatgtcacccaggctggtctcaaactcctgggctcaagtggtgctcccgccttggcctcccagagtgctgggattacaggtgtgagccactgcacccagcctgtacattttccttgaaatcgtttttggatgtttagtcttatttccttattcagagttcacctgtttattttttttttcatttccccaatttagcctgcgtttcacccagccctagcaatataggtttgggtcagagaaattcaagcggccaggggatgctgaagatggcccattatggccgggcgcggtggcacacatctgtaatcccagcactttgggaggccgaggcaggcagatcacaaggtcaggagatcgagaccatcctggctaacacagtgaaaccccgtctctactaaaaatacaaaaaaattagctggctgtggtggtgggcgcctgtagtccaagctactcaggagactgaggcaggagaatggtgtgaacccgggaggcagagcttgcagtgagcagagatcgtgccactgcactccagcctgggcgacagtgagactccgtctcaaaaaaaaaaaaaaaagatggcccattgtggtaagccttgacttgaattagtcaccaagctagtcttatctcttttctaggctaattcttgttttttgtttggctcaaaacaaattgtttgtcttcagaacacaataaaatccagggagagtgtcctgttcttcctacagacgtcactgggacatcttattctttaattaattcagtcaactaaaattggtcaaatacctgctctctgtgccagagttataaactttgtatttgtataattgctagtagctctcttacatttcttactttatctatctggcatttgatctacctaataccttccaatatcacctcatgtccctttaccagcttggtggtttttctatagttcaggaaatcaaacaaaatggtgtgtgacctggaggtactagaaaaacaatagcaaaccaactccaaagccagcagaagaaaacaaataaccaaaatcagagctgaaaaaaattaaaacgtgaaaatccatacaaaagatcaatgaaaccaaaagtttgtgattcaaaaaaaaaacaaggttgatagatcactaactagattaataaagaaaacaagagagaagatcgatccaaataagcacaatcagaaatgacaaaaatgacactacaactgatgcctcagaaatataaaaaatcctcagagactgttataaatacccctatgcacacaaactagaaaacgtagaagaaatggatagattcctggaaacacacaagccccctaaaattgaagcaggaagaaattgaaatcttgaacagaccaatagtgagttctgaaattgaatcagtaatacaaaacccaccccaaaaagcccttaatcagatggattcacagccaaattataccagatatacaaagaagagctagtaccaatcctactgaaattatttcaaaaattcaaggaggaaggactcctctctaactcattctgcaaagccagcatcattctgataccaaaacctgggagagacacagcagaaaagaaaacttcaggccaatatccctgatgaacatcgacacaaaaatcctcaacaaaatactacaaaccaaatccagcagcacattgaaaagttaattcatcacaatcaagtaggctttattcctgggatgcgaggttggttcaccatacacaaatcaataaatgagactcatcacatagacagaattaaaaacaaaaaccacaggataatctcaatagacacagaaaaggcttttaacaaaattcaacatcccttcatgttaaaaaccctcaacaaattaggcattgaaagaacatacctcaaaataataagagccatctattattcaactatccacagccaacatcatactgagtgggcaaaagctggaagcgttcctcttgagaactggaacaaaacaaggatgcctactctcaccacttatatcaacatggtactggaagtgctagccagagaaatcaggcaagaaaaagaaataaaagacatcccaacaggaagagaggaagtcaaactagctctgtcacagtgcaggcaatataattctgtacccagaaaacactgcagaccctgctaaaaggctcctagaactgataaacaacttcagtaaagtttcaggatacaaaatcaatgtacaaaagtcaataacatttccacacaccaataatgtctaagttgagggccaaatcaagaatgcaattccatttattttatccttttgaataaaatacctaggaatacagctaatcaaggaggtgaaagatctctacaatgagaattatgaaacacactgaaagagatcagaggtgatacaaacaaatggacaaatattccatgctcgtggataggaagaatcaatattattaaaacagccatagtgcccaaagagatttttagattcactgctattcctatcttaattagcaacatcattttttcacagaatttaaaaaaaaaaacctattccaaaattcatgtggaaccaaaaaacctgaatagccaaagcaatcttaagcaaaaagaacaaagccggtggcatcacactgtgtgacttcatactacactacaaggctacagtgaccaatacagcacagtccaggtacaaaaacagacacgtagaccaatagaacaagataaagaaccagaaataaagctgcacgcctacagccatctgatctttgacgaagttgacaataacaagccatgaggaaaggtctccctattcaataaatggtgctggagcaactggctagtcatatacagaatattgaaattggacccctccttttaatcatatacaaacattaactcaagatggattaaggacttaaatgtaagacctaagattacaaaaaccctagagaaaaaaactgggaaatactattctggccattggccttggtaaagaatttatgaataagtccccaaaagcaatggtaacaaaaacaaaaattgacaagtgggacttaattaaactaaagagcttctgcacagcagaagaaactatcaacagagtaaactgataaccaactgaataggagaaaatatttgcaaaccgtaaatctgaagaatgtctgatatccagaatctataaggaacttagataattcaacatgcaaaaaaccaccccatttaaaaatgggcaaaggacatgaacagatacttctcaaaagaagacatacatgtggccaaaaaatatatgaaaaaatgcttaacatcactaatcattagataaatacaaatcaaaaccacagtgtgataccaactcacaacagtcagaatgcctgttattgaaaagtcataaaatagactgggcatgtggcttatgcttgtaatcccagcattttgggaggctgaggcaggaggattatttgaagccaggaggttgagaccagcctgtgcaatgtagcaagactgtgtctctacaaaacatcaaaataaatggaaaaaaaaaaagaaaaagaaaaagaaaattaactgggtatggtggcgtgtacctatactctcacctactgggaggctgaggtgggaagattgcttgagcctaggaattcaaggctgcagtgagctataatcacaccactgcactccatcctgggtagcagaacgagaccctgtctcaagaaaaaaaaaaaggcaaaaattaacatgttggaaattagttcagtcactatggaatgcagtgtgaagatttctgaaagaacttaaaacagaactaccattcaacccagcaatcccactactgggtctatacccaaaggaaaataaattgttctacaaaaacgacacatgcactcgtatgttcctcacagcacaattcacaatagcaaagacatggaatcaacctagatgcccatcgacagtggactagataaagaaaatttggtacatatacaccatgaaataccacacagccataacaaagaacaaaatcatgggggtttttttgcagcaacatggatgcagctggaggccattatcctaaacaaattaacacaggaacagaaaaccaaataccacatgttcttatttataagcaggagctaaacatcgggtaaacatgggcataaagataacacggtagacaccagggattactaaagaagggaggatggaagcaggtgtgggttgaaaaactgcctattgagtaccatggtcactatgtgggtgacgtcagtatcatgcatacatcaaacctaagtgacatgcaatttacccatgtaatgaatttgcacatgtatcccttgaacctaaaataaaagttggaaaaaaataaaagataagatatcccgtatcctcaataaaaataaaagtggcgtgtttgtgcacttgactttgtaacatgttttccaaagatgtctttgagtcataaaaatgggaaatacacatgttggtttctctagtcatcacttgacaacttacatgttttacctttcttatgatggtctgtctcatttcttcagtgacagggctagacattctgttttaaactcttcccacagctgtatattattcaacacaactttaacagagttcatagagtggagattgaggatgtttgcaaagttaaatcatttatttttattttttcttaaccatgtcccgcctgctttattcattattaagaacattgatgtgaagattaaatggttttctctatttttatcttcaaacgatctctatttgtggcttctgcacattgctagatttattccagccacttacactagggtcatagtttagcttcagctcggagccaaatgccccacagctgaaatgaccgcacctctgaagtggcattttcccaggccatgcctccctttaataatgagccagccagggggtaaatttgtatctcattacaacagagccttgtattaggcctggagaataattaaatgtgaggaattataattggttccctctttgaaagctctctcagcaccatgtctacacttaagccattacttttatttttaatctaatggtttgccgctctctctccctctttctctctccaaattaaatatcaaccataaaagaaaccaaggaagtccagaaatctgtggctttaaaaagactggatctcgaaaagattttcacaagacgcttccgaaacagacgtttgagtcggaaaccttggagtgcagtgaacccgctgctcaggtatttcctgtcaacaaacatggttaccaggttactgggctcttctgcccagggcatgctgtcagttttacaaactagaataaacgatagacgcatagaaagtttgagtaggaggaactttaccatctgagtcagtgattttttttttcaaacttatttgtagctgtagaaattggtgttcaaatgaaaacccagaaacccaatgattaaaatagaaaaaagtggaaaagctctaactgggggacagagacaccttgggcccatccctacgacagttcctgcagagactcttggtgcccctaaggcaaactacagagtaatgaaaagctctatgctgaggccagaatacctgcattctcctagtgattctaccatgtactaactctctaacttcaagcaggataattaaacttattgggcttcagtttcctcccctgggaaacaaggatggtaatactaactcatgaggttatttgagtattaaatgagttaatatccataaagaattagaataatgccaagtacacttagtgcctagtcaatgctggtcactgttattgttattgtcattattctttttcttttttttttttgttgagacagagtctcgctctgtcgcccaggctggactgcagtggcacgatcttggctcactgcaagctccgcctcccgggttcacgccattctgctgcctcagcctcccaggtagctgggactacaggctcccgccaccacgcccagctaatttctttttgtatttttagtagagacggggtttcaccgtgttagtcaggatggtcctgatctcctgaccttgtgatccgcccgcctcggcctcccaaagtgctgggattacaggcatgagccaccacgcctggccagttgtcattattcttataaagtaattacagtttaaaattcaagttaaagtgtacatattgtgaaatgagcttttaacactattctgtaactaattttttaaatgcctggggtcatttgaagaactccagcaaacactctaacaaatagaagacagaaagaaagcaagccttcatttgcataaaacggccaaagaacaatagccaaataaattccatgtttccaaaagttaagctctatacacctatgctcacagcagcattattcacagcagccaaaaagtagaagcagcccaagtatccatccataatgaatggataaacaaaatgtggtcgccaggggctgggggagggaggagtaggaagttattgtttaatgggtagagtttcggcatcccaagatgaacagcattatggagatggatgctggtgatggttatactgcagtgtgaatgtgtttaacactactgagctgtccaacctgcccattttatagatgagaaaaataaaattgagaagaaaaaatttgttcaagtttgcacagaacttcttgtaaactaatatagttttcagcttccatgtgtcttcataatacaggaatctcaccatgctggaaatgattcgaggtttttaaataatactaatttttcagacaaggtggtccccctaaagcaaagcccactacttacttggagcttcacagtagaatcagccatcatttccagcgctaaatatgacaggcttactgagggatagaatacctggatgctctgctctatgggagatttaaggaatttttcatcagtaattttgactgaattccattttcaccctacatgctgaccaattaaattgttcctcttaatgttagtcagatagaagccacggtaggtatttcagcagaagaaatttaacacagggaattgattaaaccggttttggaggtctgagagaaccaaaagggaaaaatggaggctatcctaaaatcgtcattatgggaaacagcacaccagcctggggctggggtatacggcagtggttctccacttcagcttcatcagaatctcccagagggtttgttcaaatataggttgctgggccctgtctgctggaatttctgattcagtaggtctggagggtgaacctcatactttttaattagcatttcctaagtgatgctgatgctgctggtcccaggaccacaatttgaggactgcaggtctaggggaagatcttggagttgtcagaacgtagaagctcagaagaggagcctgagagcaaggactgaaatccctgagaaggtactgcccagctggtggtgttgtctcaagatctcagagggaaaaacctcatgaagcctggactcacgcctcacaggaggagaaattgcccggctggtgctggtaccttcaaggaggtaagataagggtgattctggaagtaccaaaagaacctgaaggctagaaccagctgtcactacgaaggtgagaggaatagcaagaggaaggagccaggccctttgacctccttgaaccatccggtaaccctgtagtgctccctattgacagaacctaaagggagcagcagacacagcggaaatatgatttgctgacctagcatcaaagaacaaggcataaaagggtgaatttggagcccagaaacaataggtgaagaccagcgtacacacaaagcacacgctttcctgcagcatactagcagagaactcaagtcactgtgttgtgtgtggttttttttgttttttttttttttttttttttttttttttttttttttgagatggagttttgctcttattgccaggctggagtgcaatggcatgatctcggctcactacaacctccgcctcccaagttcaagcgattcttctgcctcagcctcccgagtagctgggattacagacatgcgccaccacgcctggccaattgtgtatttttagtagagacagggtttctccatgttggtcaggctgatctcgaactcctgacctcaggtgatccacccaccttggcctcccaaagtgctgggattacaggtgtgagccaccgcacccggcccactgtctgtgtttaagagccaacttgatcatatgatccagcagtctcactactagatatatgtccagaggaaaggatatcagtatatcaaagagacatctgcactcccatgtttattgcagcactattcacagtaaccaagacgtggactcaacctaagtatccatcagcagaagaatggataaagaaaatgtggtatgtatacacgatagaatactattcagccataaaaaaatgaagtcctgtcatttgcatcaacatggatgagtctagaggataagtgaaataagccaagcacagtaagactaatactgcatgatctcacttatatgtggaagataaataagttgatctcatagaagtagagggtagaagtggtaactagatgctgggaaggatggatggagaagggaatagagaggttggttaacggttacaaaattatagctagataggaggaataagttctagtatttgatagtactgtaaggtgactagaattaataataatttattctgtgtttccaaatagctagaagaaaggattttgaatgttcccaacacaaagaaatgataattgaggcaatgggtacactaattaccctgatttgatcattacacattgtacacaggtattgagatattacactgtattccataaataggtacaactattatgtgtctattaaatttttttaaagagccaaattgtacaaaagttgtttgttttgaaatattggaataatactcatcatggagagaatctcagactgcgagatgacagcaatgttttcaattccactctcattcttgtgcaccttcttattgagtagaatggtgaggccacatagctagatttataaaatttaaacaagtatatgataagattccttggtacacgtagattttataaaaattagattatattatgcataatattgcaaaacttcctttttcatattagcaatatactgtgattatctttctcttccaattaatacgtgttctttcttttttagagacagagtcttgctctgtcgcctaggctggagtgcagtggcacgatcttggctcactgcaacccctgcctcccaggttcaagtgattctcctcccttagcctcccgagtagctgggactacaggcatgtgccacgacacccggctaattttttgtatttttagtagagacggggtttcaccatgttagccaggatggtcttgatctcctgacctcatgatcccccggccttggcctcccaaagtgctgagattacaggcatgagccaccgcacctggccaggttctttcttttaatggctacataacattctattttatgaaagttccaaaatctcttaacacttcctttttgggggcatttagtttacttctattgttttgctatcacgaacagtgtttcagagatgcccttgccctcacattcttgcacacttgccagttataccctacggataaattcttagaagtgaaatttctagattaagggatgagtaatgttagatttttttacttatatgtatcttgatatccttttaaataaatttgggaaattaaagtcattttccttaaactcttataaattttaagaaaaacaaaagtattaataatcgaagtgttaatattgattatttctagcacattcagtttggggaaaatttatgatctagtagagtagtacttttgtgaggtagatgtcacaaaaaatgtgtagtatggagaaattgtccagtagtatgtccatttagtagaattttgagaataacattttgccataaattttatagatatttaccattaatccatttgtagtcctacaacatatagttgattacagttatacattttttgctgagtctttggttcaaagcatgcagttcccaattacaaagacattcctaatggaataaaacatccactttgtgactgatttaaggttgttttcttaaagcacaccgcagccaaaagtggacacagcttgaatagcaaattttttcctttttgttgttgttgcttcatccaataactgttaccaaattcccgtagaaaagtgttgcccactcccacatcgacctttggaagcataacattcagctttggtgtctatacacaatttaatttggaaggctcctcacaaatcatcttattttccagtttcaaaaaccaagttctgagtggagattaagacagggtctctttatttcccagtgcagtctcctatctatttatttgtgaatgaatgaattagttaattaatgagccagggtttcactttgtcacccaggctggattgcagaagaagtcatcgtggccaagcgtggtggctcatgcctgtaatcccagcactttgggaggccaagacaggtggatcacttgaggtcaggagttcaagaccagcctggccaacatggtgaaaccctgtctctactaaaaatacaaaattagccaggcgtggtggcgcgtgcctgtaatcccagctactcaggaggctgaggcaaaagaatcacttgaacctgggaggcagaggcagcagtgagctgagattgcgccattgcactccagcctggccaaaaaatgtgaaactccgtctaaaaaaaaaaaaaatccaatctttcctattggctttattaaatacactttaactttagaagcttagaagcacaataattagaactggcctaactttaaaaaaaattttcacaaagaaattagtaacttgtagggtcatttgtaatctttttctctgttgatttttacagttttaaaaagttaatacaataatttatttacttattttttgagacggagtctcgctcttgttgcccaggctggagtacagtggcaccatctcgggtcattacaacctccacctcccgggttcaagcgattctcctgcctcagcctcccaagtagctgagattataggcactggccaccatgcccagctaattgttttgtatttttagtagcgatggggtttcaccatattggccagtctgatcttgaactcctgacctcaggtgatccgcccacctcggcctcccaaagtgctgggattacaggcatgagcccaatattttaaaaatagtacattattacagaagctagatgtgcactttaaattattatcagaaaattagtatgacagacaaattctatgattgtcccatcatctgggcctgtgacattcacacctttgtgatgttcatccccgactgtgggtgggacctgggacttgcttctgtcaaaacaatatggcaaagcatgagaggatgtcacttgtgatcatattagatagcagccaaaatggattaaagacttaaatggggccgggcgcagtggctcacccctgtaatcctagcactttgggaggttgatggcggcggatcacctaaggtcaggagtttcagaccagcctggacaatatggtgaaaccctatctctactaaaaatacaaaaataaccagatgtagtggcggacgcctgtagtcccatctgctagggaggccgacgcaggagaattgcttgaacctgggaggcggaggttgcagtgagctgagatggcgccattgcactcaagcctaggtgtcgcagcaagactcggtctttaaaaaaaaaaaaaaggtaatcatacctcactgcagccttgaactcctgggcggggttcaagcagtcttcctacctaaacctcccaagtagctaagactgtaggtgcacgccaccatgcctggctaagttttgcttttttttttttttttaagagactgagtctcattgtgttgcccaggctagtcttgaactcccggcctcaagcagtcctcccaccttgtctacccaaggactgggattaaaggcataaaccactgcacctggcccagtctcctttttgttacaacttcctccagctctgttttgctctggtgtgagacatgagcatggttcattaagaggcttggcccccccagccccaggaaagaacaagccaacaaccgataggaatgtagtactgtttttagtcctttcctcaggactggtttgtctgcataagatgagtaactacctgcttccaggtgagaagaagacatttaattttagagtagtccagccaggaagctgagatgtcattcttatcaaatccgcagtttcttcagaagacttgaggcctggctgagattctgtagtcccaaattggagcagtcttgagacatccaagattcttcggttctcattttagacttgccgtctctctcacaaagacccactgttttctctcacaggcaggcccccgccacttaaacgtgctgtgcgacgtgtctgggaaaggccccgtcactgcctgtgactttgacctccgcagcctgcagcctgacaagcggctagaaaacctcctgcagcaagtgagtgccgaggactttgagaagcagaacgaggaggcccggaggaccaataggcaggccgagctctttgccctttacccatcagtggacgaggtgggtgccactgtttccatactggagaatctcagtgaagactctgagagtcatgtggacaattgtgttgttcattattactatatagcagcccatggtgtcagggctcacttgtatgatttctggggcctcgtttttcactcaggcaagcctgtgtgtcatagcagagccattattgattatcacacagatgggattctgataataataacaactggaattttcatagcactttacaaaatatgttcactaagagcatctcatttaatccccaaatgtttcaagggtctacatgtagtaatcacacccagcaagtcaaaccatcctattatttgaggggatgtgtggtcactaatccattgagacatacattacttaaactttgatgttctttagtgctttgttactttctttttaatggtctctatgagcaaccagagagacctgctttgaaaacatttcaggctaggataatcacagcccatgctcccaatgtatagaactttgggatcttgattgtttacttcttcatttattggagctgactgacaacaataggataatgtagactttgcctgtggtcactgcctgaggcactttggatgaaatgagaggtgacgattattcaagccttttgtctgtttgaactccttatactgtataggaggctctcagttttcccctctgcgtgaggttatctacacttctgggtcttgccagaacagattactgctatatctctgctgtccaaatggtattgaaagttcagttggaagaaacaggatttgaggaaactgcataaaagatattctatccatccatgcctctaaatatttgaaattcgatccttggattaagtgagacaatcagagagcctgatacccccacccttctggattgtgtttgctaacctgcccttcagtgagctcacgactggtcagcaaggaggacaataaaggaaacagcagtcatgagataggatatcacgtccacatggaaatactattgttgacattgacctactcaccatctagcaccttcctctttgatgatctaaagggcaattagccttcacatcttccgagaaagaagaagcacgcttctgctgagataatacaaacacttagagattgtgctcattttgtaactaactctcttaagttctttacttagagcaaacttctgtccaccttcaccaaatgtggcaacttaatgattggggtcctgaatttactccagctttcttttcttttcttatcctgattttctaagcaccttggtttcctcatctatttttattttatttgcagtttttgtcagcagcctcaaatggtcttctgaatgaggcagaatataaaaataaattatctcacttatatatagaatctaaaaaagtggatctcatagaaacagagtagaaaggtggttatagcaggggctgtggggagagggagaaggtgttggtcaaaggccacaaagtctcaggcgggaggaatacgttttagtgacctatcgcactgcacagtgaccagagttaataataatgtgttacatatttcaaaactgctttaaaaaaggatttttaatgttctcatcacacacacacaaaaggtaagttggtgaggtgatagatatgttaattagcttgatttaatctttctacaatgtatgcatagatcaaaacattacttgatttaatctttatacgatgtatacatagatcaaaacatgacactgtaccccatagatgttcacaattactacttgtcaattaaaaaataaattaataaagtatgaataatgtgagcaatatcatcatctcctttcctcagattaaaaagcaacaattaggctaaagagctttttcaagattcaacagataaattaaattacaaaatggggccctaacccgctaactacaaagttcgtgttcccttgtttatgtatctacatacatatgactacctggtatgttgggacacataactgaaatccaaatatgatatttttaaatatcatgtaactttttagtttccatccacgacattaagactttttaccagatttgtcaaaacatattaaatcagactgatttggcctttactttccttcctcttcctctcagttctgtgatggagatgccaacatgtaatagagggacccaaagtggatgccagaagagagagaacaattaaaggatgcagagaatatgtccagtgagacgtttgcttgtcagtgtctccctggtggtattagaggggagaatgttccatctgaacagattaaaataatgaaacgtagcctggttttagaggaactttgttttatgatctttgaaacaatgcagacgctccattgggactgaatgttataatctgggagcaggcctaatggggcctgcttttattgagtagagagaagtgcttcgtaattagtgttgcagttatttgtaaactggcgtgtctaaaatgcttgagggcctctataccagccctttaatattttgaagctgttgtcacagaaattgcatttgtatttataatttgtgctttctccaaagaaagttctatggaagaaaggtaaatttctgcctactctgacatgattacaaatgctggttttttcgatgacacaatcagatttttaaatatatcattacttgatttccctgtaaggaaagttagaagagaggtaaactagtatatccaagttatggctgagtctacaggagaagcaaaagttggacttaaccaccaagcttctataaggcaagttctttccctaattcattctgagtctacaaaaggcggttattctacaaaaggcattctatgtcaatccctaagaaagattccactgatactccaaattatagaaaagtttgctgaggctgttggttacaagtgacagaacccaactaaaaccaattcagaaaaaaaggctaggggagtacttcttggctcacctaagaaaatcacaggtaggcaaatgtggagttgacctctggatccattgggagagtaaatgaaagaatatcatctctctcatactgtctctttctctctcattatctctttcattccgttcatttatatatatttttaggatgatgaaaacaagaggtatccattaatgtttcacatttccactttctgtttgcttgggaattagttgccatttcagttagctataaagcctgaggaaattcatatagcttagaagagactgaggaaatatatcacccaaatgtcatatgtggaccttgtttggatcttgatttaacaaaataacagtaaaaacaaattgagacagtcagggaaatttgaaactgacaaaaattatttagtggcaataagaaattattaatttttaggcataatggtattgctgtatgtttttaaaagtctttatcttttaaagatatgtactgaaatatttatatatgtatatggtctctgggaagttgcttctatgtaatccagtattgagcgagaaaggtggtaagtgggtaaatagatgaaaccagaatgcccctgaattgaacttgttgaagctagatgatgggtgaatggttcttcattgcattgctctctcaacttttgtgtatgtttaaaattttcccaatgaaaatcttttttaaaaggatttcaaaaattagaatctagaccaaaggcagtcccagaaatccatgagtgtctctaccttcaggttgttttccagttagggagatcttccctttagatatgtctgttccaatgatcctaaaaggtccagattgccctgagcgagtaggcatcaaaacaatgtctcctctgaaataaactcagccattccacccagcaacatggccaaccgccgtaaccacaaggaatggggaccacagggagaggttggagtaatgatgagcttaccacattgatcattccatcaaagtgggtacatatttaccaggaaggtgactttactgctatttgcaagaatgttaagcttgctgtggggtattcactggaaagctcccaggaaaagacagtgagatgtgaccctgttctttggacccttgcgatgggcagagcactcaccagtgtttggaaagcatactgcaagagtgggaattactgttttcaaggatttgcactacttatttttgcatacatgaatataattaacatagaatgatagttcagatacagatgttaaggttacaataggggcttgatatttctctttaagtgtttagtttctgtgcggtaaaataaacaggtagagctcttaatttgtcattactaaatttcatatacctagcactttaggaagctctaactgcataagcctgtctagaacttgtcaattcaaccccaagtctctatcatctgtttaagaaaacagtgaactgagaaagtgactctgtattataggatcaatggtttacagccttaagtgaaccattctgactcagatttcaaatctgaaactcacatacttactagtaaagcccttgacaggagaaatattgcaaatgtgtaattagagtgggcaaaaaacacacaaaaacatcaacaataggtataagattttgcaatgccatctggtggatgttactaagccatatccatgttcacatttccttccttcctgcttcagtctctttgtcttgaatgcttgggtttctaaaaggagaaactgttttgctgcaaatgctggctttgaggttgggggttggaagagaaactttcttataaaaggcagagtgttagaaaaaaagcaaatctaagttaacttgagccgtggagggtagccttcccttccctgggttaactctaattggagctccccacagaattcactaatgatttccttacgatgtgattaaaaataggaggatgctgtggaaatacgtccagtaccagaatgtcccaaggaacacctgggcaacagaatattggtcaagttgctgaccttgaagtaagtatcaacaaacacactgccaccgctttgagatttatcttgccttttacatacaaatgttgtgtttattatcagagcttgaatcaaagcggagctcccaaaatacgtctaacagtgggcagctgtggagtagtagaaagggcacgtttgagtccattcctggattttttttctaccaacttcttgatggtcattcttctacaatagagaaggcaaacacacgtgtctactaaagttaggcaggtaaggtcattgagtgaaatgacctacattaagaaaaatagcgcttaagtcagtggtgtgctggagtcgactgtactaactcgtgagatctgacagtgcatatctcttcctgggttcggtgaagtcacattggtaactttaaattggccatggcgaaagtatttacaatgtagaaatcagccaatgctacacgtttgcaccaccctcagcacccggagattatttgtaaaacatttaccagtatgccactgttgaaacacaatgataaatgcaactgaaactcagtgccaggggacaatagggagtggtgaggactgtagtaaactatgttaagggggcactcactgctagcaacagactcttgccatccaaataaacaggcccatttttgtcaactgtcttttctattttttcaagagaagctgaaaacccagatttttctgcataatataccgactccctaaatatgttctcattccctttataaacaccatataattaaaacacgactacagtctggtttcatcttgtgggccaattatttgccacatctacttcaaagtagttgcatccaaacgtttcaattgtatactatgatagcaaaaaaaaaaaatcctctatagacatgtattaattttgtactttcatattaaaatattatctacattataaaacataatagaaattttaaagatgaactagataaatctatataaattctagtattttcttcttccactgcaatagattgtcttgtgtaccctcggagtgcctccatacctctcttcgtctctgcagactgctattttcaagaattagttctccttcaaatccacagatgaaaactttaaagttgtacatattttacctaagcaaaactacagaagcgtaacatttatttatatactattagatgggtcatccatctctcaaagtcacttcataggtcccttcagcggcccctggtttgcagtgagaaggcatctggattctggatgtaaggctgggtttcaacccctgggaacttccctgggattttgagttcttccctataaatgaagttgatagaccttatggtctcaaaattcctacctaccacaaacttctatgattctaacgcatagcctctgccaacttcttctgcctcagaaaacaagccagcaagtctgctcacacagctatgggtggtctcttgatattatagtctcctcccgctggccagttctaccagagggtcttcagggccttttgtacggagaaatgagcagcccataaaccagctgagtgtcaagtaatgggcacagaaaagcaagctcttgcccttgcaaaccaacctggcagtgggagcttcctcatctgtctggttggcgggaggactgagtggaagtggctcttcccctctgcattgtttaggaagccttcgctattgtctgagggacacacctgccccgacaggatgcatcatcaggctacttttagatgcagcgactatgtcatttgagatggcagaaattctcctctatggtgctcatagccaagctttctagacctctccagtgaatgagaggcagctgttctcacaggtgggaaaacatggtcactaagagagatatgtgttattttaaaaaaatgttaatggaggccaagtgtggtgactcacacctgtaatcccaacactttgggaggccaaagtgggaggatcgcttgaggccaggagtttgaggccggcctgggcaatatagtgagaccccctctctaccaaaaactaacagatgtgttaatttttagccctagctacattgggaggctgaggtggaaggatcgcttgaggccaggagttcaaggctgcagtgagctatgatcatgccactgtattccagcctgagtgacagagtgagaccctgtctctaaaattaaaaaaagaggagtcacttgaatatctcttaatgaaaattgtaaagtgcagtttctagtgatgtccccgcaactgccaaagcagaaattaagtcgaattgacatatttgccaggtgcacttggcctgctcatgtgttttaaatagtatctatactaacctataactgcaagagaagagatagaccaaaaagacagccctccgagtaactacttagagtaaactagatgaaagaaagaaacaaattcttataggtaagcctagaatgtgacagtatgaatagtaaaaatataagggtaatattaatggcaaatgttttcccatttacattgatatgtaggattctattcataatactacatgttttagcccctgaggaatttgtttaaagttgtagacatctgtaactgtctctgtattgcttttcagaaatatagaaaccctcaaagatacagagagaattagggtcctgccaattctgcaaatgtttgtaacagaaaaaaaaaaaaagaatgacaacaaagtatttttctgttttgtgttttaaatggagaaatattttaagatttaataccatcttatgaaaagtaatctcagctcttaggagtcttcttgatggtgaaactttaatgtgcagaaaatttgcccaggcagtttcttttaaatgcagattttggaggaccttccataacaatctccctcaagagattctggttgagtaggtctcaggtgggatcaagaaacctgcatgctggctaacttcttttgcttcaaaatgctagattctggggactacacttaaagaacaaacactcacggaaaaagcccaggttctgtgatcagagatggctgggctcaaaacctgaccgaacactcacggaaaaagcccaggttctgtgatcagagatggctgggctcaaaacctgaccgaacactcacggaaaaagcccaggttctgtgatcagagatggctgggctcaaaaccggaccgaacactcacggaaaaagcccaggttctgtgatcagagatggctgggctcaaaacctgaccgaacactcacggaaaaagcccaggttctgtgatcagagatggctgggctcaaaacctgaccgaacactcacggaaaaagcccaggttctgtgatcagagatggctgggctcaaaacctgaccgaacactcacggaaaaagcccaggttctgtgaccagagatggctgggctcaaaacctgaccgaacactcacggaaaaagcccaggttctgtgatcagagatggctgggctcaaaacctgaccgaacactcacggaaaaagcccaggttctgtgatcagagatggctgggctcaaaacctgaccgaacactcacggaaaaagcccaggttctgtgaccagagatggctgggctcaaaacctgaccgaacactcacggaaaaagcccaggttctgtgaccagagatggctgggctcaaaacctgaccgaacactcacggaaaaagcccaggttctgtgaccagagatggctgggctcaaaacctgaccgaacactcacggaaaaagcccaggttctgtgatcagagatggctgggctcaaaacctgaccgaacactcacggaaaaagcccaggttctgtgaccagagatggctgggctcaaaacctgaccgaacactcacggaaaaagcccaggttctgtgaccagagatggctgggctcaaaacctgaccgaacactcacggaaaaagcccaggttctgtgaccagagatggctgggctcaaaacctgaccgaacactcacggaaaaagcccaggttctgtgatcagagatggctgggctcaaaacctgaccgaacactcacggaaaaagcccaggttctgtgatcagagatggctgggctcaaaacctgaccgaacactcacggaaaaagcccaggttctgtgatcagagatggctgggctcaaaacctgaccgaacactcacggaaaaagcccaggttctgtgatcagagatggctgggctcaaaacctgaccgaacactcacggaaaaagcccaggttctgtgatcagagatggctgggctcaaaacctgaccgaacactcacggaaaaagcccaggttctgtgaccagagatggctgggctcaaaacctgaccgaacactcacggaaaaagcccaggttctgtgaccagagatggctgggctcaaaacctgaccgaacactcacggaaaaagcccaggttctgtgatcagagatggctgggctcaaaacctgaccgaacactcacggaaaaagcccaggttctgtgatcagagatggctgggctcaaaacctgaccgaacactcacggaaaaagcccaggttctgtgatcagagatggctgggctcaaaacctgaccgaacactcacggaaaaagcccaggttctgtgatcagagatggctgggctcaaaacctgaccgaacactcacggaaaaagcccaggttctgtgaccagagatggctgggctcaaaacctgaccgaacactcacggaaaaagcccaggttctgtgatcagagatggctgggctcaaaacctgaccgaacactcacggaaaaagcccaggttctgtgatcagagatggctgggctcaaaacctgaccgaacactcacggaaaaagcccaggttctgtgatcagagatggctgggctcaaaacctgaccgaacactcacggaaaaagcccaggttctgtgatcagagatggctgggctcaaaacctgaccgaacactcacggaaaaagcccaggttctgtgatcagagatggctgggctcaaaacctgaccgaacactcacggaaaaagcccaggttctgtgaccagagatggctgggctcaaaacctgaccgaacactcacggaaaaagcccaggttctgtgaccagagatggctgggctcaaaacctgaccgaacactcacggaaaaagcccaggttctgtgaccagagatggctgggctcaaaacctgaccgaacactcacggaaaaagcccaggttctgtgatcagagatggctgggctcaaaacctgaccgaacactcacggaaaaagcccaggttctgtgatcagagatggctgggctcaaaacctgaccgaacactcacggaaaaagcccaggttctgtgatcagagatggctgggctcaaaacctgaccgtgccagtccctaactgtgtagactttggcaagttccttattccctgggaaccttgctttcctggtgtgttaaatgcagataatatctgcattacgctgtagttgtgtaaagagactgatgtgtggaaagcacttattataacacaattttaagtctttaataaatgtcaattctctttttctttctcggaaccacagaggacttactactcagtaccaacctaagtatatcacagcaatattcaggccctttgtgtagtagggagtaaacaattaaatatagattgagcatgccaggcagcagctggtgagcctaggcccaggaaagcctccaattggcctggtgcagtggctcacacctgtaatcccagtactttgggaggctgaggcaggtgagtcacctgagctcaggagtttgagaccagcctggacaacatggtaagaccccatctctactaaatatacaaaaattagctgggtgtggtggcacatgcctgtagtcacagctgctagggaggctgaggccgaagaatcgcttgaacctgggtggcggaggttgcagtgagccgaggttgcaccattgcactccaccctgggtgacaagagcaaaactccatctcaaaaaaaaaaaaaaagaaagcccccaattaatgtgcaattacctaataatagaaagaataatcatagaaatcctcaacactgggcttttcggtggtaaaatgtatgtaacataaaatctaccatctttttttttttttttttttttttgagacagagtctcactctattgtccaggctggagtgcagtggcatgatctcggctcactgcaacttctgcctcccaggttcaagtgattctcctgcctcagcctcccgagtagctgggattacaggcacttgccaccacgctcggccagtttttgtggtttagtagagacagggtttcaccgtgttggccaggctggtcttgaactcctgacctcatgatccgcttgcctcggcctcccaaagtgctgggattacaggcatgagccactgcgcctggccaaaatctaccatcttaaccatttttaaggtacagttcagtggtgagtacattcacattgttctgcaaccatcaccaccatccatctccaggaatttttctcttcccaaactgaaactctgtacccgttaaacaataactccttattctccctactccccagcccctggcaactcccattctactttctgcctctatgaattttactactctaggtgcctcatgtaaggggaatcatgaagtaactgtctttttgtgactggcttcttttactcataatgtcctcaggttcatctatattgtagtatgtatcagaatctccctccttttatggctaaataatattccattgtatatatgtagcatattttgttatggcctcatatatgtatctgttcatggacaagtgggttacttccaccttttggctattgtgaatagtgctgctacttggcattgtttttaagatacattcacacacatcattatacgtgatcctcacaacaaccaggaaaatggaaaggcaagcatccttaccttattttgcagataaataaatggaattcagaaaggcgagtaacctgattagggtcgcagaattagcagatggtggaggaggaacagagtccaggtctctgcctgggtgccctgggagtctgccatgattccaaattgcctcatttccaaaggcgccatttgagcaaataaccctttttgtctgtgctcatattctgtccaaatattcttctaaaaagtcctcttttgagacaaagctatccattgatgaggacatcctctcacacatacctggagacaaaacatgactttattgacatgatgtctgaggtaatggtggactggggcccttttcctggtgctctctgcaggtaacatccaaagccatgggacatcaagctgagaaacttggaagaccttcaccagtgttccatgtgcacctgtaatgtccaccaagatactaaaggcaaataatgcaccaggattatgctttgggattcaccgtttcgaggggaattggcaattagggccaatatgagggctcatctttctagctctcatggggcccaggcacctcagtgtttatctgctgtgctcaagcccctccctgacctcaactcagcaactccccagtaatggagttaggaagggccagacattcatccccatcaaaacccagccttcttctgactgtcccactacaaatctaaggaaaagcaattgaacttttcttttgttgccatctgaaaagccccattccttagaattgaataatacagattctatcctttaaatttttttatttcaatggctttagggtaagtggtttttggttacatggatgaattgtatagtagtaaagtttgagattttagtgcacccgtcacccaagcagtgtacattgtacccagtatgtagtttttttatccctcatccccctctactctcctgcttctgagtctccaaggtccattataccactctgtttgcctttgtgtactcatagcttagctcccactaacatacagcatttggtttccattcctgagttacttcactcagaataacaacccccggctccatccaagttcctgcaaaagacattaattatttccttctattttatggataagcagtattccatagtgtatagataccacattttctttatctactcattggttggtgggcaattaggttggttgttggttccatatctttgcagttgtgaaacagatactatctagcaataaaatgtgaaatgtgaacaagtccattacctcagacagaaagtctaccctctgaaaacacagtagttacaataagaaggtgaatcacactaaaggtccattcagcccactctctcttgcagtgagtgagtgaatgagtgagatattccaaaaatatccaccatgcttttgtaatgtccaccatgatctcaaatgattaggaatttttcacaaacctcctatatttctctattaatatcccagtgcgattctcatatacttggagttttccaaatatttcgggaaactgctcatatttttaaccagtttatctatctaggtgttttcagaaaattcaaaattatctaactcaaagccacatagattttcctctctttctatggtaggttcgagattgaaattgagcccctgtttgccagcattgccctctacgatgttaaagaaaggaaaaaggtaagaaagcaaagaaaaatccatccctaaggcacatatattgttcatgattctttgcatgtatgtttttaaatttctttgcagcaagaacctatcagatttgaaagcaaatgatctttgatgagtccagttctgttgcctttgcaatttttcaagcagtggtctgagaatgtaatttatgatctttgaagaattttagagggagaggctactggaggtgctggcctggttggaatagagaaagaatgaaatagcgcatggggttatgtataaaacaaacccatttaaatacatttttaacaagcttggatgcgcatgtaaagcttcctcagtttgagagttctttgcactgtgaaataggctcatgactgaagggcatcttacatggtagaggtctcaatttgtcacagagttcagaccttaccaactgtaatgtgcttttaatgaaaacagtgaccaagacctctcgtgtgtttttaatgtttagtcattttgtgactcctagaagaggacagcaatagcaaatccagagtaggatggacacttctgcccttctttacccataatcattctgtatttaaggaaacaagcatctcctgcataaatattaataatcactgagatttgtaggataggttaactgctaaaacaagcagaacccaatctcagtggtttaaagcagtagttctcaaacttgagcatgcatcacaatctcctggaggacttgttaaaacacagattgctggacctcacccacagagtttctgattcagcaagtccaggtggggcctgagaatttgcatttctaacagtcccctgctgatgctgaagctactggtcaggggaccacattttgaaaaccgctggcctataagcaagaagttgctgtctttgtttctttaaccatccagggtgggaggagggacccctctgttccacgcagccactcagaaatacaggctggcagtggctcctccatcttcagtatgttctctccccaaattactcttgtcactgccattgctgcccctgaagaagagaaaagaaggatggaggaggcctggaagtttgatacattgcttctgctaacaattcactggagagaattgagtcacatgatcacccctcattgcaaaggaggctggtaaatgtagtctctgcctgggcagccactcaccactaaaattctcatggtgatgaaggagagaacccaaccatacagtggctcttaagtaatacgacactaagagagccaggagcactgttcacatcatgctcttgctcagaatcttcactaagattcattccctacaaccaggctttcttcatgatggcattcctctaccttctttccatccatagtctatgcagagtcaagctagaccgctgactaagcttcccccagccgttcaagcctctgagatatttattcatactctaatctctccctggcacatcatcaccttccacccctgcctatcagaatcttctaaggcccatccatctccagtgctgcttccatgaaaagttgtccttgtcacccaactgcaaatggcctgtcactctggaacttccacagtgcttctttgtatgcatgtggtgacttgtattttgcttttactgtagttagttacatgtttaccttttccctcacctttttttttttttttttttgagtcagggtctcactctgttgcccaggctggcatgcagtggggcgatcttggcttactgcaccctctgcctcccgggttcaagtgatccatcctcccacctcagcgtcccaagtcgctggaaccacaggcacatgccaccatgctggctagtttttgtattttttgtagaggcagggtttcaccatgttgcccaggctggtttcaaactcgtgagctcaagcaatgtgcccgccttggcctcccaaagtgctgggattacgagtgtgaaccaccacacccagtccttccctcattcttgattgtgaattaattgagagcagaggtcctcctcttctgtagtgaagtaactgatactcaggaaataccggtgggttaataaacatttaaatgtttcaaggaacatctctcaaatggctccagaatacctagacattgtgacaaaacatttgtcagatttatccaggagccactttcctaaaccacatctgtgattattacacttactccttcagcaaaatttctctgtggtgtttttactcctttttaacatgtttaaaccatgaatgcaacaggtctaacttatatttcactttgctgctcatttacagatctcagaaaattttcactgtgacctgaactctgaccagttcaaaggatttctgcgagctcacacgccttcagtggccgcatcaagtcaggcgagatctgcagtcttctcagtcacctacccgtcctcagacatctacctggtagtcaaggtaattcagtacgatctgatttgcccaatctgatgttttcattgctgtgttgttcccagcacatgtttggggtgcacgcaatctcagaatgtgtccacatatcctctgagattcactttgtttccttctcagtttaccccttttccgttctaagtaaactgtttcagatactagaaagactaggttttggagacacacagacctaggtttgagtcctggctttacaacctagtaattaaatggcattggcagtttcctggtctttctgagactgagtttcctcatctgtgaagtggagataatcacactgacctcagtggatagtcatgactacagaataaagcttggcacatcttgggcacccttctcctaattaaggagagttccctcagtgacctggtgcaaagaagctgctgtggagaaaggaacaaaatctctgggctagagtttcctaacgatgttcatgttgctctagagatgcatagttacgtgttcccaagtccagcctcttacaagctgaagcgtgggctgtggttttcaagtttcatcctccttttttttttttcttcttaccatgtcacagactgtctctaatgagagttgaaatctatggggcaattgtaagtagaagagcctttcattctaggctatactctttgctgttgtaagaaaaccagatcctttctctgtacaccaaaatgactggttagaaattaacaaacatcaggtattttacctaccttaggccagataattggtcttattgattcttttttttttttttttttttttttttgagaggagttttgctcttgtcacccaggctggagtgcagtgtcaccatgtcggctcactgcaacctccacctcccgggttcaaacgattctcctgcctcagcctcccgagtagctgggattataggagcccaccaccccaaaccaggctaatttttgtatttttagtagggacaggatttcaccatgttggccaggctgatctcaaactcctgatctcaggtgattcacctgtatttggttcccaaagtgttgggattacaggcgtgagccactgtgcccggccgtaaaatcattgtaaaaacaaaacaacaaattcaggtgtctgatttcatgtgcccccagcctcttaggtttggaacattatctagttagtacagtgttttatgtctgtagtctcagtgatcgccccatgatctcatggattccaaataattcaggtagctttgaggtcacttaacagatggcaaatgtcttttcactctagcttctttaacaccatataacaaagattatgagaggttactgtagcttgaggggaacttatttaagcttatagaagtatagttaaaattatattgctgaaaagacacttctattgttgtcaaacttcaatgtgtctccttttcgttgcaatattacttagacatacaggaaaattaaagcccactatgatagccctgtaggtaagttcacaattctctgtcagcctaggaaactgaagaagccaacactagttctatagagccaaattttatctcaaactctacttcccagtggatgactttctcttgattaatccgtcatattctgccaagtaacagtggttacccattggttcctatcacttactaaatatgttccaaaattttcaaatgtataaatgtgttcatttggcataacaaacatactaaagtgtttggataggtttaagaaattgaaatctactcagcaagacagcccctggttggctttctgtttgcttttctttatcgtaatgccatcattgttgcttctttccctttaaatatatagtaaatggtgttaaactatttagcacatccaggcagacattatttggtaagaggggcttctttcttttttgtttatattcccaggccgaacatcagggtctttactgtattttaggtagcatcatctagttcaggtgttgcatataatacggctttaagggattatttccgcttaaaagtttaattcaagattttgtgaaatttttttttaaaaagaatttgttttacaatcaaggaaagaagagtgaaaatgggattgaattggaaacttttcaaaaattgtttaaaaattggtatgccgtgcccaatttaaatatttcataagttgcgatgggcctatccttatgtaagggccacatagtttgagaaaacacaaagcagagagcctagcactttagaagtcttgcagatgttaaatttcccatcttaaagagtttacaatccagttaaaaaaacaacttggcattcaaagaaatgggttcaaattcctattttgctacatttgctgtgtatggtagcaagtttagtctgtcagtctaattggacaatgatccctgtgcctgagtggttttgaagaaaattgaaataatgtatgtaaaaacacctaccctgtacctgacataccataattaggtaaacaataaatggccatgaaatatgaaaaaaataggtatgccaagtgttaatcctaccccttctgaatagagcagaaagtagtctgttcccttaagaaaagttttaggttaatctgataggcttatttgccctactttccatggttatgaggagtcatgcatttcattacacacttttgcataaatcatgagggaacaaacaataggttctcatgtcggtctgcagctccttctcatgaagtacctggagttctccttgcccactgcagccagggcatagtatctgctggtctggtcaaatctgacttctcctgcttcctgtatgttccatgatacacactactagtgcatgaagccgtggcattccccttccttgcttcagggtcctaattaagaagttcttcatctctgttcagaatttattctaaagaccacatttttaatccattcacttcatggaaaaattagcttccttccaatttgttctacaagctcctgactatgagcttcaggagaatgggggcagtgtttatcgccaccttatctcccagctgctaccatatagaaggtactcaacaataagtaaacgattgctgattagcaggaatactggtcagtttctagctcaagtgttacgtgcttatgttttcagtgtggtgcatctctcagtgggattcgccttctcttcatgctgtggcaatgggagggggttttgaacttctttgatgagaagagagacttcctgcttggagtcctccctgaagcagatattcattgagtagcctcatgctgcttcctttgaaaccccataaatgcccctttatcatgggtattgttaaatactttgtgcctaactcacagcacctattaagtatgtgtcccttttgtactgtgttgacccaaattctttcttcaaggatcatctcaactgatgggactaaatccactggttttactcttcaacatctaagttaaattttttttgagcagagagttaggaaatttcaaatttctccttgtctttcttttaaatatggtgcccaaatttatgacaactggccagccagtcactttacctgaagcaagacagaagacacttcattcattcttattaccagcattcattcctatcaacagccagttagcaaagcaagaagctgcacatcccaatgcttttgagtttctttccaagtctgttaaatccagagaattagccctgataggaattacaagggagacaattacagataatttattcggttcagtcattcattttgtggaaggttttagtccctaacccaactttcacagagaccatatctcttttttacattgtaagcaataataaagaaaatgagttttccacttcctacgtatgtctcctgggttttgttttataaaataacttttattgctgtttttattatatacataatacatgtttattgtttaaaatagaaaatacacataagcaatgggaagaaaataaaaatcacacataatcccaccatagaaagttaactactattaacacttgctgcatttgctgagtatctactgtcacccttttaatatgcctttatgatttgttaaataaaattgtatgctattctttatataaattttttaataaaaaaatatgtatcacagatagcttcctatgtcatcaaatattgtcataaaatgtaattttgatggttgcatagattcctttttatggatgtaatttatgtgccttattttaatattctttttattggtagattgaaaaagtcctgcagcagggagagattggagactgtgcagagccctacacggttatcaaagaaagtgatggtggaaaggtatggtaatttgagtgttgttaaatggagacatcttagaagaagcaggtattttcagaagtgttacacaaatagttaatgggctttagtccctaatgtgtccctatataagacactactacattttaattaaataaaagaggaaaagaaaactggtcaccgatgatgactttttttttttttttttttttttttttgaggcagtgtcttactttatctcccaggctggagtgctggagtgcaatcacggccccctacaaccttgaactcctgggcttgaatgatcctcccccttcagcctcttgagcagctggtactacaggcacatgccaccatgcttggctagttttttatttttttttagagatggggtctcactgtgttgcccaggctgctctcataattctggcctcaagtgattctcctgcctcagcctcccaaagtgttgggattacaggcatgagtcaccatgcccagcctgatgatgattttttagagaaataaatccttgaattttctaatgttgacatacagcaaggtctgactgcataacttgattggggcaaggccaccccctgttgtcttcattctgaggctctgactcagctggttgggaggtccgtggagaccccaaaactaaacagtgccagagctctcctggccttcctcaacagcatgggccgctgccctttcaggtatgcaaataactgggaattggctgccactaccatgcattatatatattcattagcacagcataggtgttgagcctatgaaaaggatatcttttctcaacagcaatttgcaaagattcccagtgtgatttttaaaacatggccttggccgggcgtggtggctcacacctgtaatcccagcactttgggaggccaaggcgggcagatcatgaggtcagaagattgagaccatcctggccaacacggtgaaaccccgtctctgctaaaaatacaaaaaattagccgggcatggtggcacgtgcctgtattcccagcttctcaggaggctgaggcaggagaatagcttgaacctgggaggcggaggttgcagtgagccgagatcgtgccactgcactccagcctgggtgacagagtgagactctgtctcaaaaaaaaaaaaaaatagcctttctggaataagacttaccttattagtattgtactctacagactcataaatgtcaagtaagatttattgaactcaaggcattttttttttaaaatctgtcttttattctgaactcagaaagaacaccttggaagtattgtaaacttcctaaggagttgttaggaagctttttagaattttttggagttttccaaggtgacttttggagaaacaggttcacttgggagcttggtagatgatatactaaacttgatttcaagattcttttatgcaaatccaagtcacatagctagccaccaaaagaattgataatctgatgtaatgagtctctttttgttttcgttagctaaaaatgtattttactaattaaatgtagcctttttgtaaactcctcgttttttaatctttatttccttatcagctagacccaagtgcatcatttttctgcctattcactgtttttattttttagtgggaagatatgtttttactctttttaatcagtagggtttggattttggagatggctgtcatattcaggtcagaggcagttgacttggtgctgatgcttgtttcagcttgtttctttccattttcctccagagtaaagaaaagattgaaaaactaaaactccaagctgaatccttctgccagcgtttggggaaataccggatgccctttgcctgggcacccataagcttatcaagcttcttcaatgtctccacccttgagagggaggtaactgatgtggactctgtggttggtaagattttcacctgcagtgggaaagggagggctccccagtgtgcgctgcccaggtccacagcttactagcggggactgggggcacagtgaggtgtgggaagtggggaggcagaaggagataaatagaatgaaacactgttatgactggattacgtagatttggacggtgatctccaaaagaaattatcacgaacattggtgaagattaagtatactcttatagtaagattttctagatggtatgacactttaaaaagctgatttttgctagccacccgctctcaaaagtaaaactttaacaagaaaatgtagtaaccatctgtagtgtgttaagcagagacaccatggtcgactcctaaacctaaaaaaaaaagcctctgttacaaaggcttcaaaaagcaaaactcaacaggaacagggcgtggtggctcacgcttgtaatcccaccactttgggaggccgaggtaggcggatcgcttgaagccaggagttcgagaccagcctggccaacatggtaaaaccctgtctctactaaaaatacaaaaaatttgctgggtgtggtggtacacgtctgtaatctcagctactcgggaggcagaggcaggagaatcgcttgaaccagggaggcgaggttacagtgagccgagatcaggcctctgcactccagcctgggcaacagagcatgactttgtctcaaaaaaaaagaaaaaagagaaaaactcaagtttcccagcaaaatttccagttcgttaaagtttactttgccaagtgcaatgaaaaaatgggcatccaaagaatatttactgttttagtttatttagcatatttctttttcgtcatctcacccgtgatctgaatcattcattcctacactgcttggtgtagaaattttcaaaagggttgcaaattttcaagtagacctgcccatatcacctgtggtggggtttctctttccctaaatgcttttgtatccaccaaatatagaagtccatgttcacatcttttcatgcattccttaagctaaggcttaagccacttctgaaatactaccttgagcagggaagtggaggaaagggcattttgtgattgctgctgctattttggagttactggtacataatcaccagtcagaactcctgggttatttctggttcgtcaataacaaacctcactttaccacatcctgatcttcctgccacagctttctttaatgccgtctatgtagacccaagtaacttattgataagagttatgtatagagcttagagggcacacaagctaggtaattcaggatagggcatgctgaggcctcaatcatctctaggtcaaggataacctgacaacagagactgattcttaaggagcaaccagaagatgcaaagatgtcatgtattatactgaggcagaatggcaagtttaggtgggtagaggtagcaagaaattctaattcaacatcatggtaagaattaaggataagaagatactcaaagacgggttggaactgctctagttctaagcaatttgattatttacaagagaacccatgagtttttgcaatataaaagcaacaagatctccacccaaatcccaaaaggggataagaaacaactgggcaaactatcagggtcccagcccaagtctgagtgtgatttggggttctaattcccattgggcagatcacccaaggcagaaactcagtcttgctgcctggtccacataatgagagcagaggaatgctgggattcagagtgtacacaggctgaccccagcatgtttgggtcacaatcacaaatgccttcaggggcatttgagtacatgcctctcccagtggaatgcaaatatagaaataaaagaaaagcaaacactgtgctgactaaataaagcttatcaggagaccctgttctggctatagctctggactcttgccgggtggcatttgggctaccctaatttccatgtgggaggggcccatggctgctcctggcctctctcctctggtcggaggaggattaaggacaccaacaggaggactaagaaaggtaggggccaatggaaggacattttcattcaaaacaaggatggccatattcagtgttcctgatcagtgactttaatcatacatattgtgaagttaataactgctgtgtgtttgaacagaaaggcatactttggagtgacaattgtttttcttaaagggagaagctcagtgggtgaacggaggacattggcccaatctagaaggctttctgaaagagccctctccttggaggaaaatggggttggatccaacttcaaaacctccactctgagcgttagcagctttttcaagcaggtatctcttcacattacagtgtgtctggatttttccccatactggcatgggcactggaacccacaggaggaggatacgtagtgattaagagagcaaattagttaagctcactctcttagttcattttctgctgcttataatagagtatctgaaactgggtaatttaaaaagaaaagggatttgtttctttcagttttgaaggctgaaaaatccaaagttgagggcccacccttggtgagggctttcttgctggcggggcctctctgtagagtcctgaggtggagcacggtgagcagctgagcatgctagctcaggtctctcttcctgttcttataaagccaccagttcccctcccatgatgcagattaatccattaatctgtgaatggattaatccagtcatgagggcagagtcctcatgattcaatcacgtcttaaaggctccacttcccaacactgccaccatggggaccaagcttcaccatgagttttgaaggggacattcaaaccacagcattcacaaagcctcaatttcattagccagaaaacgggaacaatagtacttaacttcatgtggctagcaggaaggtcaggtgacatgagacctgtcaagctcttcttagagtgcctggaatacagtaagtgctcaatgaatgttagctattttaactgagagaagggttaggttttgttccttgtgataccaactatcctatttgaactatcttggccaatccattcattatgctatgacaacagtctggctgggccatctccttcccggtggatctcagggtttcttggcctggctattcatgtgcaagtttccactttcactactgcttgatgtgcaagtttccagggctccctgcttgctcagagagggtgaccattccagatggtactctttgttagctcagtaaacatcaagactatttaaaaaaataaaaaacttcctagacttgtcaacggtatagagacagaaagtagaatgacggttgccagggtctagggatagaggggtggggagtcactggttaaagggtacagagtttcagattttttttgcaagacaaaagcattctggaggttggttgcacaacaaagagaatgtgcttaacactactgaattgtgcacttagaaacaggtaagatgggccgggcgcagtggctcatgcctgtaatcccagcactgggaggccgaggcaggtggattatgtgaggtcaggagttcaagaccagcctggccaacatggtgaacccccgtctctactaaaaatacaaaagttagccgggtgtggtggtgcacacctgtaatcccagctacttgggaggctgaggctggagaattgtttgaacctgggaggtggaggttgcagtgagccgagattgccccactgcactccagcctgggtgacagagtgaggctccatctcagaaaagaaaaaaaaaaagaggtaatatggtaattttatgttagttatattttgccacacttaaaataaactcgcttggtctgactctgttttggaaagttttccatagctacgcagtcttcgtggagcatttaaaggggttacattaacaaactgaaatgcaaaagggatgctgagggcgcctgtgcaccgtgccacatcatagaaatagtaaaggtctgaaaaggtttctattcagcatacatgtacccttcccaatcttatgaccttggaggacaaggtacttaactaagtctggatggtctcactgggaataagacatatctacccacttaccttactgggttgttgtaaggattggagatcatgcatgtgtgctcctgacccatcttgggcatatgtgggggtggacagcatttatacttaaccttgttcgagacaaatgtgaagaaaatgagatggaaagatgctttctccaccttcgaacatttgaagaagaaagtaaacttattctgtattgttccggggggtaatactggcatcagagggtgagagttatcggggggaagcttttggcctggttttctaatggtcagacgggcttccttagaatgcagcagatgccccatccccagaaggactgataagaggccgaggcacagtgagtcacagtgattgagaaggatttaacaagaagtggagctcagtgatttcagagctgtctataatcctaatttctatgaaagacttgtgagaataaaacttaaaggtaaaaatcttcccagaaatcgtttgtccccaacccaagagtcaaaggtgcatctacattaactctgacttttctcttggcaggaaggagatcgccttagcgatgaagacttattcaagtttttagctgactacaaaagatcatcatccttacagagacgagtcaagtcaattccaggtgtgaatgacttatctttatcctctttagctgtgccaaaactgcttatcgttagacacagtctttgtctaatgccagaatttataaaatcatgtttgccaagtgaaatgtgagattttgtgttaggggttaagaatctgaattgttctatgtctttggcaaacctattaatgtttttttaattttcttaaaggattgatttagtaaacaaaccttgtgctttagatctggtttctcagataatgagataattgtttaaacagaggagcccctttaatcaaataaaatattatacttagtattaaaaaagtaaatgtgagatgctttggtagaaggcaaaggcatcttccttatcctcactcggcagccctggaggtacttctgtagcatcctcaggtccagggaagccagtttgtgtttgtttttgtttttttgagatggagtcttgctctgtcaccaggctggagtgcagtggcacaatctcagctcactgcaacctctgccttccaggttcaagtgattctcctgcctcaacctcccgagtagctgggactacaggtgcctgccaccacgcccagcttattttttgtatttttagtagagacagggtttcaccatgttggccaggattgtctcgatctcttgacctcgtgatccacctgcctcggcctcccagagtgctgagatgacaggcgtgagccaccacatccggctggaagccaattttaaaactcccaatttttactgctagcaatgcagggaagttacttaacaatgtaaaattatactgtggtaattcaggaaagaactttaaaaatcctctaatccattccttctcattttacaatttcttgctttatattttattttatagaggctaaatctcgaaagttatcatgacacacttttctcaagctgtaggaaattagctccaaaacttttttacagtactatagtttgttcttattttcatgaaagaaacacagtgcaacaatctttcttgattccctcataacatgacagtttctttactagaacattcctattttctctctttaggcttgctaagactggagatttctacagctccagagatcatcaattgctgtctgactcctgaaatgctgcccgtgaaaccctttcctgaaaaccggacacgcccgcacaaagagattttggaatttccaacacgagaagtatatgtccctcacactgtgtacaggtaagaaacacaggctcgggctgggcgtggtggcttacaccataatcccataactttgggaggccgaggcaggaggattgcttgagctcaggagtttgagaccagccttggcaacatggcaaaaccgtgtctctacaacatatacaaaatttagctgggcatggtggtgcatgcttgtaatcccagcaacttggcaggctgaggcaggagaatcgcttgaacccaggaggcagaggttgcagtgagccaagattgcactactgcactccagcctgggagacagaaccagactctgtctc

SEQ ID NO: 15567 - DNA, 175577 bp, Homo sapiens; identical to SEQ ID NO: 1173

SEQ ID NO: 15568 - DNA, 175173 bp, Homo sapiens
cgcgctctgcgctccccgaaagtggctgcaagccggccgcccactgtcagggttggggggacagagaaagtgatgtgcgccttctaaagcctcgcccagcgccgccgaagcagcttcacctctccaactttctcccaccgactgcttgtcttgaccctgccctccaccctccccagagccacttcgggtgcgcgctcttgggtaaagggggggtcaccggctgtctgggatggcttccaattttaatgacatagtgaagcaagggtacgtgaggatccggagcagacgcctcggggtgagtatcgatcctctccgtgttgctgttcgccggttcgattgtctctctcttgagccagcatccctggagggtggacggagagtccccggccgcgcgccggagaattgcgcggtggctttctcagccgaaacccgcgtctccggggctgtcactgtaaggccagcgtctaggtatgtaatggatctatctttatctcttggatgacttggctttctgatggtggccgcgtgttgggcttcagtagcccctggagcccatctactcgaaataaatatttctcggtagccatggaagttggagctgagaagcccgggcgggggtgcctgccggatgcccccggttcccctcttttcccactcgccgccaacttaacttttccgggggatggatcggctggttgagaaagaggacacgcatactcggtgtgaacgaggtcacgaaccctctgaccccagggagagatttctgccaagcgtaaggtgtctttggatccccccacctctgtcccaggtgtcgtgtcaaaggcggtgcgggctggcctctggtcggggccaacttgggtagatacttgaatctggattttccgtggttcgaagccggggtggtggatttctgttgctggaatacaccctggaggtccacggaagggttatttacgtggaacctgatacctggcatagcgcaagtgctccctacatatgtcctgaaaggaagaatgaatgaatcttagggcacttgggacagatgttgacacaggctagctccttccttaaaactccctctctttcgcccctttctctcttggctcttcgctggaggaggcttcaaaagagaacctacccttcctctccttgggactgaatgatggtggaagaattcttgagggagagggaagatactggaacgatttttttatttcctaaaaatttcaaactaggtccctcatttctctttgcctcctatcaagtgttgtcgctgttttagttgatcctgtgcgtttggacataaggggtgaaaagtgggggtggagaggtggcgggggcggggggagaaaatatcctttggtgtaatgcctgaaataagtataatgtcagtaatcgtgtggaatgccgccattgataatgagtggtaaattgaatagctttctttagaaatatgtgtcatttggcatctttctcttacttggtctttggactgttttaatgtgccagatacttttactgaaaactgaaaagaaatttcacagtagtaaactcagctagggagggaagccctgtggggaggaacatccgcaattattataaaactcttgcctaattcgttttggtctttttcttttctttttctcccctgctggtgaccatgttttagcgattatgtcctgtgttattgtgaatatatacatatgtaattagggagaaatgtaacagaattcaccatttccatcagctctgccaaagtttccttggttttcttttctgctatgcaaatattctcatcttcaagagcacccattgttgggggtactttactgagtgactcccatgtaaggggcaaacaataatgggaactttctatttttggtatgcttataggctggccaagtgttacaattttaaggggagttaagttaaaaaaaaaaaaaacccagcattctaatttagctttactccatcatgtcaatggaaggaattggtatgagacatccattctgtgttagggagcattccaatgggaagaggacatgcattattaatgcacaaaatatgaattattcataaggatcagagtttatgccaaattgtgacacatggtaatttatttgaaaaactggttaccatcactttcttgtttgtggtaactgagattattttttctagattattacaattgacacaacatagccctatgtgtgtgccaacatttatggacagatatttgaagcagaaggaacagaaatatttagtttgtatttgttttatgttttacagcattttggatgctaatgagcagtatactttctcaagatttattctttttgtctgtgttcacgttcagacttcagaatatctattgaattatggttattgctcatggagagaaaaggtcaaaaatatgatcaagtaaatctggtcttatttgttagcattggttttctcaccagttaatttttaaaatattcttatggtatgatttacaaaagaggctgattacatagttgccagaacacagtgcaaaccaaagttttaatggaggctgcaaatattggtgaaggatgctgtacggaattggcatggggaccctatgtccacagtaaggaatgttagcggtattaatctaggctacatatagtctagaacagcatgcgacatgtatcttctaggaatatgtgccagtctcaaagagaggtagggcatttattttgtctagcacagagtagacacttggtaagttcatgttgaaatatgtgctgaactatatagtgcatggatggtcttgccatttataacctttaggaactaatacaacagcatttattaatggaatccagaccatgtttgggacggtttataattaaatacaaaaacatttcatggtaagcagctgttcctggtgccaaggaataaatgcttcttcagatttggagaaagaggagaagggaacgcattctgcttctattgcttgttgacctttgacctttcttggcctcagtttcctagtctgtacaatgaacactatttaatgttcttgggagcattaaagaagatatttgtgaaaatgcaatgaaagtctagaacattgattctgcttgtatcattttctttaatcaaagatgagttaggattggtagacggatataggaattatctatttccttctctttctatgtagaagtgtacaaaggcataaatgtttatgcagctccagattttttcaatggatgaaacttttacaaattatatacatatatgtgtatgtgtgtgtatttttatacataggaataaatatatacatacaacctatgtacatattgtataatatataatatacgtatatttatatatgtgattttttaacaggacaggaaacattctaaaaacattcccattcaaatgggtcacagataagtggtcaccttcatttgaaatcctaaagagtttaaatgattaagcaatcaaatatgtatagatttattctcttctttagacatcaaaaagcttaatgaaatataattcatttaactcaaaagtttcagtatcttcacatctgtattccccagcttaatccccattgtttcctggaggtctccagctgtgccctgggtactgaatttgttcaggaatgtcgacgttactatttgaggggctgggggaaggaggggagcagctgtccataattatttgagtaatcgattaaatgcactaaaaatttctttttaggggagaggcaaatcaggcaatttgtacaacattaacctgctgaatgtgtgacttagatagcatcatataacaattctcacttcgtttctttccttgcaatggagatgattttccaatcaatcattgtcatggcttgcccacagtgcaagtttcagaacggaaactcgggtttatttatctacgcacaatccctcagttacttgcctttaagtgacatttctgtgctcttgtctaccaaggacttagcagcttggacctcttttctgacctccactcatgtaaattctcctgtctatcccacatctccacttggatgactcacagacctgctgctcctagagtcctctccatcttagccactagaggtcccagcattttggttgcgaaggtaaaaatcacaagcgaaccttggtgtcatttcactcttctcccctcatctcccacccctacaggcaatccatcaggagatcttgtgggctgtatctttgaaatatatctagaatccggctgtcacctcacgctatccactgctacgaccctggtccgaaccctcctcatctcctccctgtaacattgcaacagtcttctcatttgacttcctgcctacactcttgctcccgctagtgccttctcaatacagtaaagtgttcctttggaaatgtaagaaaggtcatgtcacctggctgctgaagctgtcagaggcgtgtgaaccagagcaactccatcttgaataggagctgggtaaaacaagactgaaacctactgggctacattcccagacagttaaggcattctaagtcacaggatgagataggaggtcggcacaagatacaggtcataaagaccttgctgataaaacagtttacagtaaagaagccagccaaaacccaccaaaaccaagatggccatgagagtgacctctggttttcctcactgctacgtggcgctacccccaccagtgctatgacagtttacagatgccatggcaacgtcaggaagttacccttggtctgaaaaggggaggcatgaataatccatcccttgtttagcatatcatcaagaaataaccataaaaatgggcaaccagcagccctcggggctgctccgtctatggagtagccattctttatgcctttactttcctaataaacttgctttcactttacagacttgccctgaattctttgctgtgagagatccaagaaccctctcttggggtctggatgagaacccctgtctggtaacaaaaccattggtgactttccatatactgcagagaagtcttacaatgggccatgaggccctatgctgccccagaaccctctcgttcactgttttctctgcttggaatatgctgtttccccagttacctcctcctggcttgctctctcacctccttcagccttttctcagctcctaccctctcaatgaggcctttaaggcctccatctatctatctatctatctatcaatcatctatcatctatctatctatcatctatctatcatctatcatctatctatctatcatctatcatctatctatcatctatcatctatctatctatcatctatctatcatctatctatcatctgtctatcatctatctatcatctatctatctatcatctaccatctatctatctatcatctatctatctatcatgtatctatcatctatctatctatctatctatctatctatctatctatctatctatctatatttttttggcggagtcttgctcttttttccaggctggagtgtagtggcgtgatctcagctcactgcagcctctgcctcctgggttcaagcaattctcctgtctcagcctcctaagtagctgggattacaggcatgcaccaccatacccagctaatttttatatttttaatagagacagggtttcaccatgttggccaggctggtgtcgaactcctgaccttgagatccacaagcctcggcctcctaaaagtgctgggattacaggcgtgagccaccgtgcccggcctcagaccactctattttatttcttctccctctcctttccttctttccctgcccctttttctccctagacttattaccctctccttcatttatctttgtattgcctatgtactgccaaggacatgtgaagctacatgagggctgggacttgtttctctcttctttaatcatagctgtcccccagtgcctagtgcagggcccagcacagagtgggcatttgatgaagatttgtggaataaattaatgaccccatcactgtgttgtggcttaagagcataggctctgacatgtgactgcgttaaaatcccaactcactggctggttatgtgacttctggtgagttatttaatatttataagcctccatcttctgtaaaaatatggagactcttactactcacctaatagatgatgatcataaagagcttaacacagtgcttgacacagtaaaaacccaattaatgtttattagggctctcactcctacttccagtgtggttagagacaatgacacttaactggttattatttcactgtttctactgcaattgttcatatcctcaaagaacttgttttttagttaggaaaacaaacttagtacaagtaccaaatgttgcttggcattgatggttgatacagaaggaatttataagatttcgcctttataagattttttatgattctacacaaatggtagagatataaaataaggagaaatgcctcttcatgtaactccaattcgagtgaattcactggactaggaggtatttttgttaacttggggactgttttcttttgtggtagagaagaaattttaaaaattggtcagctcacggccaggttttaaaaataaacattttctaattctttcattttatagtttcacctgacctggtatgccacaaacgctttcatgtttcatttgaggattttagatttagatgttcaggaatccatgcattttttatggtaccatgacaaagtcataatcgtagtatgaaaattatacagatagaataaactcatatactccttttttttccttttgagatggagtctcgctctgctgcctaggctggagtgtcctggtgtgatctcggctcacttgcagcctccatctcctgggttcaatcaattctcctgcctcagcctcttgagtagctgggactacaggcacatgtcaccacagttggctaattttggtatttttagtagagacagggtttcaccatgttggccaggctggccttgtatgcctgacttctggtgatccacccgtttcagcctcccaaagtgctgggattacaggcgtgagccaccgtgcccggcctcatcatatgctattgttatttaagtatatgtatgcacatgcacatatatgcacatatgaactcatgcaactattcagtaagatatgtgaagtttagttactctttaagaacaagaggctttgggataactttaccagtagggaaatttatggccagatagactgcatatatatacatgcatcagctgggacgactcagttattttggcttcatttgaatcagcttcattgacatggtttccatgtcagaagggctttccagctggtatttcagtcgtcttcatctgattgtccatgtggatgagacgattaattgtgcataaagtcagcctttacatcatcatccccaaaactgatttaagcagagtggccaatttagtgactttgtatatagacataaaccaaattagtgatatgattgtccccacatctgccaatgtatttttgaaatcatatttattagaagactagaaatatttatttttaaagcagctttgtaatttttgtggggaatcgtttggtattttaagaacttagttttcattggaatatattttcttccatttgttttatcattcctcaaatatttcttgagtacctattagtgttaaccaccttaaataaggcagatacaatcaccatcctcaaggagttgacaatttaatttttgatttgtattattaacaagagattaatgtattcactatagttaaagaggaattaatctgagtaacaggtcaaatattgaagtgaaaagatgcctgaggatatttttctattctatttttgtgaaatgaggaagggcaaatttgatttttctcttactctaggaatttgatcctagtagggtggaaattaaacctttggagattctaagccttgaagagattatggtgcgacccccccgttcctgtgaaattcaaaataaaattgtgagtttagaaatgccacatgatatatgtgaatgtttaaattaaaatagcttctttctagaatgcagatggctacattttggataagtatttggaagctgatttttgcagagcagttgtgggggctgcctttatttcactagtgttctcaccctctgtttatgccctggatcccagagaacaaaattgttaactggttgtcttgtgttcttaagccgagttgttaactaggctccagtgagaggatgcaggtgacttttctgagacaatgctttgcagcttgtatgagattcttagagaagtctggtcctccctgccccagcctctcccactttccacctgctatgccttcttaaagattaagatcaggttgggtgtggtggctcacgtctgtaatcccagcactttgggaggccgaggcgggtggatcacccgaggtcaggagttctagaccagcctggccaacatggtgaaaccctgtctctactaaaaatacaaaaattagctgggcatggtggcaggtgcctgtaatcccagctactcagggggccgaggcaggagaatcccttgaacccaggaggtggaggttgcattgagccgagattgcgccactgcactccagcctggggaaaaagagcaagacttcatctcaaaaaaaaaaaagttaagatcaatatttcattattttaattgaagttttatttttagataattgttatgttcatatgtagttgtaagaaataatatggagagatattccatgccctttaaccactttccccccaatggtaacatctttcaaatttgtaggacaatataacaaccaatatattgacaatgatacaattaagatatagaacatttcatcccctggaggatccttcacagtcttcttatatagctgcccctcctgcccctgtcctccatatccctaatcccctgacaaccactaatctgttttccttttgtcattttgtcatttcaagaatattatgtaaatggagtccaggcttggtggcttgttcctgtcatcccaggactttgggaggccaaggcagaagggccacttgagcccagaagtttgagactagtctcaggcaacatagtgagactgtctctacaaaaaataaaaatagaaaattagccaggtgtggtggtacacgcctgtagtgctggttatttgagaggttgaagtgggatgatcacttgaccctgggaggttgaggctgcagtgaactctgatcatactactatacttcagcctgaacgacagagcaagatgagactctgtctcagaattttttaaaaagaatattatgtaggctgggcatgatggctcacgcctgtaatcccagcactttgggaggccgaggcgggcagatcacaaggtcgggagttggtgaccagcctgatcaacatggtgaaacactgtctctactaaaaatacaaaaattagtcgggcatggtggagagctactcaggaggctgaggcaggagaatcacttgaacccggatggcggaggttgcagtgagcggcggaggttgcagtgagcggcggaggttgcagtgagctgagatcgtgccattgcactccagcctgggtgacaagagtaagactccgtctcaaaaaaaaaaaaaaaaagaatgtaatgtaaaagaaccatacagtatgtaatgtttggggattggcttttttaaaactcaatataatcccctgagattcgttcaggttgttgtgtgtataagtttgttcttttttcttgctgagtagtgtaccatggtgtgtatgtacaataggtaccgtagtttgtttagacactcacctgtcgaaggacatgggttgtttctggtttttggctatcatgaatgaagctgatatactcatataagcatttgtgtagaggttttcacgtgaacatacgttttcgtgcctctaggcaaatgtccaggagtgcaattgctgggttgtagagtagttgtgtctagtttttaaagaaactgctgaaccgttttctcacagttgtaccattttacattcacattagcaatgtgtgagtgaatcggtttttctgcatctttgccagcatttggtgtcatcactgtgttttatcttagccattcttctagatgtgtcgtggtatcttattgtggttttaatttgcatttttgtaaagggtagcaatgttgagcatcttttcatgttcctgtttgccgtccatgtcagtaaaatgcctggattgcttattttttaacggttgagttttgaaagttcttcatatattctagatatcaatcccttttagataagtggtttgcaagtatcttctttcagtcttgtcttgtcagcctaatatcctgaagatgtttcaattttttttgtaagttttatagttttatcttttatatttaagtccatcacccattttgagtaatttttgtataaggtgtgcatttcaggtcaaggttatgcctatggatgtacagttactccagcacttttttgaaaaggttgtcttttcttcattgagcattttcatgtcttcgcctgggtcctctattctgttccattgttctatatgccttatatatgtacagtgatatgtctatatatgtctatatatgtctgtatttgtatatatagacatatatgtctatatatgtctgtatttgtaactatacaataagtcttgaaatagggcacactgatccctctcagtttattctttttcaaaattgttttagctattctagttcctttaccttttaatataaattttaaaataatgtctataactactagaaatctttctgggatactttctcattttacacacacacacatgcacacacacacacacacgatttaattggtgcattagtttatttttgtggtggaaatagcagaagtttgagactcacactttagtttgggtctcagcttggccgcttattggctctgtagccttagggaaaattgcttactctttctgatctttaccttacttatatatgaaaaatgaggataatatacgaaagatgaatataccaggctcttaatcctgtgcctgactcatagtagaaactcagtgagtcatactattgatttttattttttattggtaagaggttgaaatgatatttttagtttattgtctgtgagaaccatggccttggtggaaattaattcactcatattccagcggaagagtcatgtttttgataataaaaaaaaaggttgcattctatcttcctcttgctgttgtcttctatgatatatttttgtaatattgggtttatttaggagcctccagtgaaatcctatcttagaacataaagacttgaatatattagccaaaatggcagaactttgattataagactggccacagtatttttgcctattaactctaacagctttgtccaaatgtgagatttatatatctggagagataattttagggtagtaaacagcattcaatcataaaatgagaaaaagtattatttattgtccaacataactcaaagagttggtgactactaggtcttttcctagagaggaccatcctgacttaggtgcagagtgttcagctcacagcgtcatgtttcattgcactgattaactttatattatgttaaatttgacattttctctcaagtgatactggtttccaatttcagataagaatgtgtgcttcctctttaaataaagcttatttatttaaaaaagcaaagtaacttaattaatgttaacttacagtgcaggtattatatgaccatgcagtgacaaaaattttggaggtaggtggtggtacacagacgcagtgcaaatccaaagggtgcaggactgaagtgtgggaaactgcagaccagtgtacttattttttaaaataggttttctaaaatttctttacttatagccgccaaatgtcatcattttatataaataacttaaaaattaggtgcttagggaaaaaactcccatgtacccaataccatcctcttacaagactttcctctgatatcaccatgtatatgtcacttctcaccccccaaaaactgtacaaccttattttggttttgcccaagcccttattttttcttcccttcattcggatgtacaatggatactgctgtgattaacagaaagagaaactagcaagtctcgtcaatggactaactcttttatttaatacaagtttccatgtttagaagagcaattcaactcttagaattcattttattatcttaacaccatacattcattcaataaaagaaatttattttccaaacttttaagaaatcatacttctttgaatcccctagcaaaattgactctttatactaatttctcagtttccaggtttctgtctaccaaagtgcagatatgttggctaatctgtgtaagagccactttttgagtctgggttccattccaccaacagtggcctcaaatctggaagttatcacgaacgtagtctagtcttcagcatccattaattcagtgtggtgtaaagtgagattggatagcaacccttcccagagagtttgtcctcttggagaagtcttcactggtttgaatccatcttctccattaactggttgctcttaacgtctgattttctcctggctggctgtctcttggcatccatattccttcctcagaatgacttgccttgactacaacatttaagttgactcctcacatccttctagaacatcacgtaatttaaatccatgtatagaacttaacaatttttctttattttgtgccatttatttctcttctctttctgtttctctgtttctatatacatttttttcttgtttgtttttcttctgtaagagagggaatgaacaagatagccaagtccctggcctcatagaacttactctaagagacataagttttatcttacatatattatttgcttatgtatttttccttccctccttccttctttccttccttccctccctcccttccatatattatttgcttatgtgcttttcctccctccctccctctttccctacccctcccctccctcccctcgtccctccctcccttcctaccttccttccttccttccttttattattaaatatgtgcatgaagtaggtgttattttatgcccattttacaaattatttacatctgacagtaagttctctgaggccagggactttggctatcttgttcactgctgtatccccaggtcgtagtccttagtaaattctcaatatttgttgattgaatggatgaatggttttacttcctgtcagaagaatggaatggtgtattcagatgtaagaagacaaatagaaaactgtgcctatatcccatctcattttgcagtagattctcttctgaacagtagaacattttagaatttctcatagttgtttatatataatctgcaaattcatcatcaggaaatacagcagttaatatcaaaggtttggatttactccattaaaattaaattttatttgaattcttttggagtaggtaatatgtacccttggtacaaaattcgaggatacaaagtttatacaccaaagagtagagtttcctttcatctccatttcctagaatcatctcgttccctttttcagaagcaaccactgtgaatagtctcttccagaatagtctatatataagtagttttgtgtgtgtgtgggcttgtgtgcatgtgtgtgtctgtatgtgcgtttgcatgcaatttatacttatatagtcttctgagccatggatttcttatttagtgatatatcatagttttgaataattcgataggattcccctgtatggatatatcttatatattttatttgattatttatttattcttctttccttccttccttttttttgttaaatatgtgcataaagtaggtgttattttatgcccattttacaaattatgaaactgagatactaagaggttcagtttttggccagctcacacagccttatgtgtaagaacctgggttcgaatccaacgtctatctctttcatggaacattggggtaaatccattttttttcctctgttacaaacagtgctatagaccacccctcatcatacccattggagagcctgaaggtgaataaattcttagaagtgggacttattgttccaagggtattcacatgtagaatttcatgaaagttgctttggaggatgttctccagcagtggacaagaaagcccatttcctctcattttgtcacattaggcctgagagccttttcaacgttttgctagtctacgaggtgagaaatggactcatttgtgtatagatttccctaacttgtggctgagtttcaaggcattttataattagaatcttttcagttgtgcaggcttttttcttttaagagtaatatttactcaactcaaaaagtagttatttagtgagcatttacaaacatataaatcataatttactgtcttaaaacacaccttcctgggaaatggctcaatggaaatcttttacctaaaagataggataaattatatgttaactgttactgtattttttctctaaaaattaaattatgaatttgcacttttgataaatattatgttgaatgaaatgatacatatatacatatacatacgtatatacatacatatattttaaatttaatcagataaatacatattcattaatacagctcagtctatattcttggtcaatcttataaaatgcttcaagtgtgtctagccatgtggcaggagtgggagggtaggggatgatgtgaatctttgtactgagtgctagatataatttctgaatgttgcatttatgttgttcctgggtatctggtatcttgagcctcttttttcctttctctcttatttttattttttgagacggagtcttgctgtgtcaccaggctggagtgcagtggcacgatattggctcatggcaacctccgcctcccgtgttcaagcaattctcctgcctcagcctcccgagtaagtagctgggactacaggcgcatgccaccacgcccagctaatttttgtatttttagtagagatggggtttcaccatgttggccaagatggtctcgatctcttgaccttgtgatccgcccaccacggcctcccaaagtgctgggattacaggcgtgagccaccgcgcccagcctcttttcctttctctctaagctctggctatagcatctacttttcactcttcaaatggtgaactcttttccgtccatgtctttgccatctcacgcttccctttgtcagtaacgttcttccatggcaggctctgacttcattgtcaggtcaaaagtcccctgcccagggaactgtttgaccatccaatcttaggtggtctccttcaggtattctctgtctcactcctttttaattgcatgcagaatcatgcctcacaactgtaatgatttcttaaattattcatttctttgttgcttgtttcttctagtaaccacaagcactgagcgggtctttttctgttttgttcatggctgaattcttagtggctagaatagtatctgagcacacagtaggtgctcaataaatatttaagtgaataattgaaaacctgaaataacatcttgcatgttaaattatgaaagaggcaagtcaccctagcatagaatacatactcatattcatatatgtcaagaaattccaaaaggtttgtggaattctattgtgtgattcttgattcttgtagcctttttgcagtatcgcagctgcagtccccaggacaggccaaactggtagaagagaaacctggccagggtgagaagggcccaattttcacccctgtcctactgccggccatctgctatgagcagaccatgtcactgaactgcttacacctcggcttccgctgcggaagatggagacggaaatgcctgccctccttcccccaccagctgttcacctctgcacaggaagggtgactgtggttgtgaagagcatctcaagtacccgaaacattctattcagtcccaagtgggtctccgcagcatcccaccattggcttcctgagtggaaaatagctgagaaaacttgggatttttctccaaaattaccatgacttgtatcagatcccaaacaactgaatgtattctttactttggattccaagagtgatctcatattagaaaaagcagagtttaatttctggcaaagaatggcaaaaaatgaaagaaagagagaaaaagagagagaaagtgaaagaaagagaaaaagaaagaaagacaaagggagggaaagaaagaaaatggacccactctatctacaacaaaggatatcatatgtatatatgacatatatatcatatatataaattcatatgtcatatatataaattcttttaatttaaccagtattttatattacatatacatggtagagaaagaaaacaatgcaaaaaaggatagaatgaagagaaaaattttctccaaccccagactggtctcacttcctggggttagtcattcttagcagattcttgtatattagtacagagacgtttattagaggcaagcataaaagtgcgtgtacttgtgtgtatatatataatttgttttacacacatgggttcatattatacaatcctattatatactttgtcccttttaacgtatgttgaaacacttttcaaaaatttttatgaatggtcaatattcatttttttctatgtcacaatttctttaatgtagtccactaacaatggacatttttaggtagtttccaggttttgctatataaacaatgaggtagtgacatccttgggtatacactcacgcatacatgatactgtatttctaagataagtcctaaaaaaaagagttactcttacacagttgtgtacatttacacttttgaggaataaaacaaattttcttcaaagaggttgtaccaggtacactctggtaaagagtgcttgtaagagtgtggctttgtgtgtgtgtgtgtgtgtgtgtgtgtgtgtgtgtgttttaggatcagaggtaacagagagaacaactttttaaaggatgttcttggccaggtgcggtggctcacgcctgtaatcccaacactttgggaggccaaggggggtggatcacttgaggtcaggagttcaagatcagcctggctaacatagtgaaaccctgtctctactaaaaataaaaaaagttagccaggagtggtggcgggcgcctgtaatcccagttactcgaaaggctgaggcaggagaattgcttggccccaggaggcggaggttgcagtgagctgagactgagccactgcactccagcctgggcaacagagtgagactctgtccccctccaaaaaaaaaaaaaaaaaaaaaagggatgtgtttgtccctctgctccttggctcaatcccccactccccaaatctgttccctttatggcaaattgattacctaaaaattgaatctaattctatcctacctttcttacaactttcctgtgccttccccttgcacatgaatatctctgaaatgtactcaggacactgtgtgacccagagcctgctgcgttcactcgctgtgtcacaccatactacccaaaatcagtgcatgagcccaacacaccacctttagttcctccagtaggcacgcgctttcctttgtcaccatccttatatgtgctcttcctattgactagcaagttcttccccttactcttagtttctctaattactgctcatcttgaaaatccaggaaatctttttctgacatatcccagtctaaatggtaggggtagccacatgctacatgtggacatgtaaatttaattaaaattaaatataaacttaaaaacccaatccttagtcacactagccacattttaagtgataaatagccacgtacatagtcatcagtggctaccatattggacaacacagatatttttctaggctgaatgcggtggctcagtcctgtaatcccagcactttgggaggctgaggtgggaggattgcttgaggccaggagattgagacaaacctgggcaacataacgagaccctcgtctctacaaaaattaaaaaaactttgttgggtgtggtggctggcacctgtactcctaactactcaggaggctgaggtgggaggatcatttaggcccaggagttggaggctgcagtgagccatgatcatgccactgcactccagcctgggtgacagactgagaccaagtctcaaaataaaaattaaaaattaaatatttctataattgtagagaattctattggacagtgcttccctatattacttcttcataatactcatggctatttaaaaatacttgttttgagagtgttgttttgatgattttagcctcactagcctgtgagcttcacaagggcacagcttgtctcacttcttgctttttcccttatattaaatgttcaataactatctgttgaatgaatgatgagtgaatgaattaaagaattcctctcagctcttcgctttattgttgtactcttaatgttcagtggaccttctgggaaggagctggatgttctacacttttaccgatttccttcaaaactgcagttggataccttagcaagactcattcatctggggatatttagcctttcctattgggtttgacatttcagaatccattgcttaactgtgggaagattgactatgattgagctagacctgtgtggtgagcatggttttaatagtttgcttcccagatctccatccctgtcttaatgactgaagcattccttctaccagctgcttggagtgtgactcagtgacagcttgcagctgagctggtacttagttgggtgtggtggctggcacctttaggcaaggtagcttggcccatggttctcccttgattttacccaatgttctcaaaactaaaatagctcgttagtttaattttcataaaatggaaatttgatagatcatattttatttattatgttgttaaaatgccccactctcctcagtagattcatacactgaaaaaactctttgaagcccttgctgagagtacatcacagctgacctgtgcccgcccttgactccctccaaggtgctgatcctgagagccctccgcagtgaacaccctgcatgcagatctccttcttggaacctgttcctggaaaacccagtctccagcaacctgatatgtaactgcaaatctgcaactctagaccaaccttctaaagagggatttaagacctttttcaagaatctggcttgattttttggcccatggttctccctttattttactcaatgttctcaaaactaaaatggctctttaatttgattttcgtaaaatggaaatttggtagatcatattttatttactatgttgttaaaatgccccaatctcctcagtagattcatacactgaaaaaaaaataaaaaagaaaataccttaactggttcattacattgaatttgcactgggtaaagggttagtaccaactgtgtttttctctgggaggaagaagctccaaacagtaggcaagatttctgtgccttaaagaaatgttactttagcttttcttgcttcaatggcctaatagcagctcttcctgagtacctgtttatatcaccataaaaagggaatgctggttatagctcgttgtagccagagggaagagagatgcttttgtctgtgggattgattccactttaatcctgaacagggtatttggccatcaagtagcctactgactgaggggagaaaattttattttaattttttctcataactgtcaatttcattgggcagctatacatttctggggaatatttgtataatagatggaattatagaagttacgctcacaagcagatattttgagattgattaaagatttagaaagaagtggctgggcgcagtggctcacgcctgtaatcccagcactttgggaggccaaggtgggctgatcacctgaggtcaggagttcaagaccagcctggccaacgtagtgaaaccccatctctacaataattagccgggtatgatggtgggtgcctgtaattccagctacttgggaggctgaggtggaagaatggcttgaacccgggagtcggaggttgcagtgagccgagatcatgccattgcatttcagcctgggcaacagagtgagacgccatctcaaagaaaaaaaaaattagaaagaagtacatttcccaggcttctggggtacctctaagtgagactgacaattttacacataggactgcaaaagttctttatcatacagaagtaaatttctgaagttaaattcattttagagagacaggcacaggatcaagcgtgtgtgaaggagattggacgttttattggcattaaattttgaagcttagttttcagacacagatgaagttgaatattataaagatgaagaaaagaccttttgttagactaattgctctaatattaactcaagaatgggtcaactttctgcaagttaaggtcatgcattctagggaattcgatcttgattttaaataggtgtcatgaatacaaagttagaaataccagtttctccttttatcttacaaaggtgtaggctgagaaaggcactggcatattagctggagaaagactaacaggaagaatataagggttattaaaaatgtttcctactattctctgatctagagaggcatgcaagtgaagatcatattaaatttaagggagagcatattggatgaataacatcagttcaagttttgaaatccttgagaagaaaaaaagagctgagcacggtggctcatgcctgtaatcccagcactttgggaggccaaggcgggtggatcaggaggtcaggagatcgagaccatcctggccaacacggtgaaaccccgtctctactaaaaatacaaaaattagctgggcgtggtggcaggcgcctgtagtcccagctacttgggaggctgaggcaggagaatggcatgaacacgggaggtggagcttgcagtgagccgagatcgcaccactgcactccaggctgggcgacagagcaagactccgtctcaaaaaaaaaaaaaaaaaaaaagaaaaaaatgaaccagcataaatcgacatttagagtacagagagattcgatattaacttctccaattctgtactttacagatggggaaactgagggcaagtgagatttcatgatttctctaagattctggcctcttagtaaccacatttttaagctgtaaaacatataacctggtggctcagagcataaacctctgtgggaggcggtggacagacagatctttctataccatggctacattgtgattctggacacgttacttaacctctcctaatttctgtttcctcagttaaacaatatcaataattatggctcctgaatcacagggatgtcttgaacattaaataaaatagttgctgtagagccttttcataacccattagctactttgaaaagcagattctgaagttgcggaccatggctggttgttcacctggattcctgagccctggaacataatgggtccttaatgaatcaatgaatgaatattacaaacccgaatgtagagacactgcttcatgcattatgcaggctaaaattgtcatccatttaaaatgccaatttaaacagtcttacatttgaacaacatgcagctactttacttttggaatatctagttctgaactcttgtaattgaagtgtaaacttgtgtaacataagcataggtaacatcttctaaatggaggagtggaaggttaaaaggtggcataatctattataagattaaaaacatcatccactaatgagtttgaggttttcatgttttgctctattctatgttactccatttgctatatcttgtagaaaattgtcctgacatattgtggagtaggaggaaaaaagtgagtgtcagaaaaaaaggaattctggcacaaatgtgtccacatatatatttctgcatgcttgtaggaaaatgaagaaaggaaagacttctaatagtaactatgataaaggaactgtgttttccttgaagtgggtggaagtgagttgagtggtcatttgcttttgtatttttgtgcttttgtatttatttatctgcttatctagtaatctatattatttattcatttatacagtgtacattcttaccttttgtaatacaatgaaaacaatattatgaccctaattgaccagagacaaggaacagtggttggaaggtgatttcttttagtgaatctatttaagttaaaatattttgaaaatcccttctctatgtcgtaagggtacatactcagatattgtattgtgttgtcttaaaagacatcatccagtaacatcactaaatttttctcttatgtatcttttgggaccttggagagcaacagatcatgttcatccatatgtaaattaatccatttgtcactttcactgtatattttgtgttgcaggagaattagtgaggcggtgttactttctgcaccttagcataattattgtgtcattgtcagagacagtgtaaatcttgacatttacaatggaatatattttcctttagtgaccattactaatgttgttttaattaaaagcactgatagctcagggttttcagcaacatctctcccattgtcataaattagaggattaaattgtcttatttcatatcctactatgtttaccaagggaacaatagcaattctagtttgtcaaaggagagaaagatgggatttggattaatctgctcatatatttaagaattgcagcttgggtcagtgagagactgtggtcagattgagcaattgggaagaggaagttgggtcatgttttcagagtaaatcaagctgatttggaaataaaatgtaccttgataatttgtttacttttaatttttgtcacactgcaagtgttggtgtttgctgttacgtagcaaaattacattcaatatttaagggccacgatcctggtgaactgtataaagagtatgttttgtttaggacaataatagaaagtggggaaggagaaaatcatgttctattgagcttattttattcacaagctagtatttttgcagattttcactctttagccaaaaaagactttttttctcccctgtggaagaataaagccatctaactgtcatttaagggcagtcacttgtaatgcaaatatagaaatatggaaatattgacagatatgagctatatgcatcagcattctgagtttgaaattaataataatgggacactgactaatagctggttctgtacagcactatatgcttgtacagggtaaacagttactaccggtgaccccaatttcatggatgaagaagttggggatcagagcactgtcaaagcttgtcctaggccacatggtcaagagagatgaacctagaatttgaacttgggaatgtttaattaattcttaatttaactcttgggataaggtttaaacattgctgttactcccttgggagagagaggaggattcttacatgccatgctagattttctgtattcatcctttttaattctcttttcactaatcctttaaggcatgtgttattaacttcatttaagttttcaggaaactcaggctccaagaatttggaagttgtccagagttacagacagggtaaaggattggatagagtttgaatttgtatttgtggtaccggtgtccatgctagttctgttacctatacctaccctgatacagacagacctagaagtctcatcagaatgctggatggatgaggaagtgtgggtgaatcaggcatcacccacaaagactgcgtctgtgaatgttctgctaatatggcagttattgtactgctatgcagccaataatagtggaattattactgagtgggaggctctgtgtttcacttatgttgtctctatggccaatttaaaaacatctctgtgtacattagtaaggttaagacacagattaatcaatcacatttacacaaacaagatgctcacatccaccgtttatggttaatcacattacttgaccaagtagcaatacagcataatggttaaatctgggattcaatggaatctcagtctattctgacgtgttgtcactgaactcattttacaggtaaagaagtttgggcttggagggatgcacaattcactgaagattgctcacctcggaacaggaggagcgaggggctcagatccatgccttctctgcttaatctctgctatattgatgcatagtcctgtagccaatccttgtaattttaatattagtaacagggctaggtgaataccccaggttaccacttgaagattgtctcttttagatatgttctcaaactgctttatttacctgatcctctgcaaatgaggagaaacttcaagaagttgctaaatgaaaaagttaaaaagtggattttaaggaaactaaagtgaatgccatacaactgacttgaaaaaacaaaggaagaagatgcagcaggggtttgagcactctttgtgggtttatttctttaggaaaaaagactaaagctaaattccatagttagaatctttagaagaatcttaataaccaagatcatcaccaatataataaactaaatttgaacactggacacgaaaaaaatagggaaggccacatagatgtcaataaacatttttcttctttttattgtcattgttttgctgaattttataatattttccttttaataacctaatatgaacctactgccccaatacaaaattatcattttggtatatttcttcctatttttttctcctaaacattgaaagtttcacatggttacaaggatcacatatttacaatgtcatacccagtgtatttttttttttttttttttttgagatggagtttcactcttgttgcccgggctggagtatagtggcacgatctcggctcaccacaacctctacctcccggattcaagcgattctcctgcctcagcctcctgagtagctgggattacgggcatgtgccaccatgcccggctaattttgtatttttagtagtaatggggtttctccatgttggtcaggctggtctcgaactcccaacctcaggtgattcgcctgtctcagcctcccaaagtgctgggattacaggcgtgagccaaccgcacccggccgtgtatatttttaaatgtattttgttatgttgtaaatacttccccaaatcatcattttaactttaaaactgtgagtttgaagtctatgatgactaggtacgtagtttacttgatagtaaaaacatttaagttgtttttaactaaaagtgacactcaggcttgtaactttgaccatgttttagattgtttccttggaatggatgtgataatgaagttagagagtttgaatatttttatggctcttaatacatattacaaattaacttccctatgggctacgatttacattacagccagtttttaaggctagaaatctggcagtggggctgggcgcggtggctcacgcctgtaatcccagcactttgggaggccaaggcgggtggatcaggaggtcaggagatcgagactatcctggctaacacgatgaaaccccatctctactaaaaatacaaaaaattagctgggcgtggtggtgggcgcctgtagacccagctactcaggaggttgaggcaggagaatggcatgaacccgggaggcggagcttgcagtgagccgagattgcggcactgcactctagcctgggtgacagagcgagactcactctcaaaaaaaaaaaaaaaaaaaaaaaaaagaagaaaaggaaaaagaaaaaataaatctggcagtgggccacagaggtagctgatgttctatttgttttgcagtcatccatgcactggttataggatgtggctcagaatcccaaactaagtaataaaacaaagtcatatgtagagtccaatgtgtatatttcgacccttagcatgaagatacatacagtgttttgtgacttccataatttagagtctctgtaaattctttaactcatttaggtatttcattgtaaccaaagaaaacttaaatatgacttagcaatggtgagctgtgctgtgttcagcacattaataaatgccaccaaatgatttcaatgaacatttttagttcatttgttctgaaactagaaagaagacacttaatattggtttctgacttttgagcaaattttatttcctcggttaatactctgaatgtaatttacttgctatgcttgctaacaatggaaagcattgaatttggttttgtggcttatgctctttatcaattatatgccattgataaagttgtctacctccactgcaatactgggaaggttaataaagagagagcgtgctcatttgagtcagttctgtactgacagaacgtgcatctctggctatttgtggtatgtatatggcctatcagaaactacaataataattgagaccaatttaataaccattataccagtgacctagtcattcttgtagtttggtatatttaatgcatttacattcatttgtggatccatgtagaccacacattcattcatctattcaacgacttttcattgagtatcttctatgtataaggtaattctttgtaccaggagataactggtgaatcagagtaaaccagaaaatagatgaatggttagtatcgttgctctgctatgcactcatttaatgagtcattttaggattactatagcaacactattaaaaattttacagtcattcacatggctcgaaattcaagaattaaaagttcaaaagggtatacaggaaagattctctcacccgtctacccagagccaccaattctcctcaagagggcaatcaattttatagtttcttctctttcagccatatttcaagcatatatcagcatatacatatataggtatatttgtatatatgtcatgtgtgtgtacaccgcattttttccccacaaaaatagtatatatgcgctatccattattctctaactaccttgtgtcacttaataaatttcaaaaagctcttttaattattacttaaagattggccacatttcttttttattcctgtcagcatggtatttcattgtgttagatattctattaattttgaattcttgttgattatattttatcattattataaatagtactacaatgcatatctttacataagttgctttcacttagatttttttccttaataactagaattgcaaattaaagtggagcaagtttctatggctattgaaaaatattcttcaagttataatctggaaatattgatctacagtatgcacagaatactatgttttgtgtaagaagtgggggtaagactgtatatttgtatttgtatatatgtgcttgtgtttgcacaaggaaataatgcatttagttgtaagtcagtgactgggtctggtgcaggggtaggaaatagaggtggaaagcaggctaattaatatatacctctgaaataattttgaattttgatccatgtgaatgtattactttttcaaaaaattaatattaactataaaattaaaaatcaaagtatatttctttattattctgccattttcaatatatgagtacacatggatttttttaaaaaataattttatagactggggtattggaaaagtagtataatcaggtggaatgcaggaagtcacaaagtggacctggccttggaacgtgttcattggttggatctaattcatagttttgttgcttttattcttgattttttttaaaaaaatggaaaagtaatgaagtgtttcccaaatgtcatttattcatcctcttcacagtctttgtcatatgtgtgaatagttttcactgttattcacttactacttcactaaaataatttatttttcttttttttggatttttatagcagtgccattaacaaaaagccaatattattttccatgagtagaagctgcataaattggagctccttcagagaagaagaaccacaggaagatatttaattagaggtttggtttggggattttggggattatttcttttgcacttgtaggaacctggtttgcagggtctaggtgctcctagtgctgaaacctgacatcagaagtgaagatggacataaaatgaggtgattgaagacaaactgcagcctatgaagatgggctagaagcatctgattttcaaagcccccaatccaccaacttcaaagatggggtcatcttgtaaggagaagagctaagcaggtgcttggccgaggtttctgaggagctgaaggaggatctggaagcagttaaagtagttgcagcccagctgttgtccatgccaccctggtgaaccagcacatcagagacagtgcgcatgagtgagagtagtgtgcactgccctgagcttccagcggggaagctcaccttcaccttcccacatcctacaatatggctaactttgtccaccttccagatctggctaccctcaatatggctaccctaaccttcccacatcctacaataaggctacctttgtccaccttctagatctcgcggtccaccctaattctgacctgtgcaaggaaagcaattctttgaaaaatagttctagtttaactgagctgatataatacaaatccactgcaaaagataactaaaaataaatacaatgaaaatgaagcaatattagacacattgttcaatgaaggcactgagcctgaggctttctcttgttgaaaagcaagatctggaagttttagggggggtttaaaattattgttacccactgaatggaacttctccttgactcactcagaaggactgacatgaaaaatgagtatctttctcaacgtgaggttctgtgccatttgttgcctctcccaatacagtttcttcttctctctcagttgaaggaggatacaggggtgattggagatggtgtcatgctatccttggccttatctgcatttctgcttcttaaacgaatgaaatgatgaactagatgatcatatggtagacagaagggaaaagagtgattttatttatctgtagacagagctctttgaagacctgtcatgggcacacatcaaagacaaatgttgtgtgcatcaaaggcttgttggcttttgaggtggtaggtgagaaaaaagcatagtttggctcatatctgtgaaaggtgttttggccatctcagtacccattggagaattttgtgtagctaaagagacctcatgactttgagtttctggcagacctactaactgtggatggaagcaccaggggctggcttctcactgagatgcttctattcatatctgtcccggtggcattccccaagtggtgtctcctggatcccctccatccttgaatctgtgcctcatcccacaccccactgctcaggtttgaattggttctgcagtttaccagtggtttgaccttggggaagtcacttcaagtccctgcaatgtagggatattataggctccaaatcactgggtagttgtgaggattaaatcaggggttggtaaattatgatccaaaggccaaaatgcccctctctcctgcttgtttttgcaaataaactttcacgggaacacagccatacccattagtttacatgtaatctgtggctgtttgcacacctcgcagcagcaagttgagcagttgtggcagagaccctgtggctcacaaagcctaaggtatttactgaaaaagttagctgacccctggattaaacaagtgaatacctataaattcaattcccaaatgtttatgggctgctatattgaggtattgagcctataagagtgaagaaacacagacaaaagtccctgccctcatggagcttacagttcaaggagggaaacagataataaagcaaaaagaaaacccccaaaatgtaaaatatatgtaaagtgatttagtggtatggagggggaaatgcaggaaataaagagaaagagagagaaagagagagtatagggggtgggagatgcaattttaattagggtcattagggaaccttcactgaaagagtaacatgacatcagagccatgtggacacatgaagaagagggttccaggcagaaggaacagccagcataaaaggacaagagccttgaggtgagagtgtgtgtctgagtgttcagagaccaacagggaggccagtgtactcaaagcccgctgggtggtggagaggagagacctgaagatgctttcagtgagctgggacttccttggccacagacaggatgttgcattttgttcttcatgggaaggaaggcactactggcttgtgagctggggatagtgtgctttggattgcattttaaaaacatcactctggctgcagatggcggccatgagtggcagcttgaactggggttagagctgtagaggtggtgagaagcagcccagctctgcctatattataaaaacagagagttgagaattccctgacagatttggagtgcatcaggaaagaaagagagaagtcaggaagactttgatactttgacttggtcaactgcaggaatgggattaccattaactgcaatgtggaagaaacagagatagggcaagttttggggtcaaggttaagagtcagaatcaaagatgttaattttgagctgccccttagacatcggggtgggattgtttagaacaatgtctgccatgtagtaaattttcaatacatgttggctgtaccatgattggcattattactgaaggcttactcaatacatgccattttatttctttaaattttattttaatgtattttattgagacagggtctttctctgtcacccaggctggagttcagtggcactatcatggctcaccgcagcctccacctcctgggttctagcgatctcccacgtcagcctcccaggtagctgggactacaggtaggtgccaccacgcctggctaatttttacaaacttcttgtagaggcggagtctctccggttgcccaggctggtcttgaactcctgggctcaagtgatcctccctccttggcctctcaaagtgctgggattagaggtatcagccactgctcctggcttgataaatatttttgaatacctgctatgtggcagcactgtagaaacaatgactgagttctggtttctgtcttcatggggagatagagaaacacctggcgatcatacgcgaggtcactgctctgaagcagtgcagctttcggggaatcacagactctgcctgggtcctaaacatgatttctttgaagttagccatttacagtttatttaatctatctatatccttgtcctcatctataaaataggaacatcaactttatttggataatgcatctaagtgctcagtaaacaccagctgttagtataacataaaggattctataaaatcagtcatttgtttcacaaatattttttgagtacttattaccacgttacaggagtttggaaagtacttgggatacagtatgaacaagaacaccctgcctttaaggagatcaagggggactgagtggggataaataaatgaaaatgataggtcgaggtaataactacatagaaaataaaaatatatatgttctacagcagcactgtccaatggagacataattagaggccacatgtgagccacatgtacaatttaacatttcctagaagccacattaaaaaataaagtgaaataggtgaaattaactttaatgctatattttatttaatcaaatatatccaagacattatcatcttaacccataaaaatataaaaattattaatcaaacattctacattatcttttctactaaggcatcaaaaatccggtattttacgccctgtggcacaattcttttcagcctagccacatttcaagtgcttgaaagctacatgttgctgatggtggttgtcacattgcacagtgcaggtgttgaatgatgaggtgtctgctttagactgaatggtcaggggaagatgagatcttatgacaggaaggacccagccatgagaaatttgaaggaagccctcatgggtacaagatagaactaggcaaagaacctagggcaggaatgggcttcttatgataattaaaagcagatcaacaaagccactggggccacaccctagagaagaaaaaggatagtcatatcacaatggagaattatttggggccagttctggtaggagtttaaagagttcatgatgaggagagtggatgcattctaagtgtattgagaacccgtggaggatttaagaagggaagtgatatgattaagctatcactgactgctatgcagagagtagaatgttaacagcaagcatgtaagcacaaagccatgagaaatacatccagtctagctttagaagctcgaagatggcttggaggaaatgtgtcctaaagaggacttacccatgccaaagttgggtttagacggggttttcagagtcagggggtgttttagacccatagacttcaaacttttctgattatacaatgcatgcaattaaaagtagaactcccagtatttgtataggtgtttatttcctatacatgtgcactgctatcaaaccatgtattgcagtgttattattttactacaatttttcttatttatcccacctccccaccacacataaataaaagtttcattatttttttcttttatcccactgcattttactttggaaatgactgttccaggcagacagaattgcacaggcaaagggctggggatataatgatgcttgtcacacatacgagatggcaggagcttatatctggagggtggaaataaggaagtgggtaaggtgatggtgagggagtgttgagaactgtgcaggggctacctcatgaggagcttgcaggctttgggaatgttttaatttttatatttatttatttatttattttgacacagagtttcgctctttgttgcccaggctggagtgcaatggcgcgatcttggctcactgcaaccagtgcctactgggttcaagtgattctcctgtctcagcctcccaagtagctgggattacaggcatgtgccatcacacctggctgattttgtatttttagtagagacggggtttctccatgttggccaggctggtcttgaactcctgacctcaggtgatctgcaccccttggcctcccagagtgttgggattacaggtgtgagccactgtgcccagctatttatttatttttttagacagagtctcgctgtctcacccaggcttaagtgcagtgacacgatctcggctcactgcaacctccgtctccctggttcatgcgattctcctgtttcagcctcccaagtagctgggattacaggcacacgccaccccacccagctagtttttgtattttggtagagacagggttttgccatgttggccaggccggtcttgaactcccgacctcaagtgatccacttgccttggcctcccaaagtgctgggattacaggtgtgagccaccgcacccggcctaatttttaattttaattttaatttttatgttttgagctggagtcttgtgctgtcacccagcaagggtacagtagtgcagtcatggctcactgtagccttaaactgctgggctccagcgattttcccatctcagcctccccagtagatgggactacagtcgtgcaccactgcacctggttaattttacaatttttttgtagagacaggggtcttgcttttttggcccaggttggtcttgaacaccttgcctcaagcaatcctctcacctccgcctcccaaaatgctgggattatagatctaagccactatgcccagttgggaaagattttaatatattttcatatatgatgggaggccattgctgggttttaagcaagagatggtgtctagtattttggtaagcattttacattcattttctcatcttatttatctttaacatctgcaaagcaggaacaaatgaaagggtttcaagcaagatagtgatgagagcatttattattgagtagaattttctcctttctctcctctccacttctctaattaaattctgtaagttaaaactcatgctggtaaagaccaagctttaatcacagagagaaatttcattctaggacagactgcttgcctgctcacactgacccctgcctccacctgtcccgaaaactaatgctgcctgggagctagtcgactaaaaaccacccagttacactgcgatctggaaatgtccattggaggctttcagacggcagtacatatgcttttaaaaatactggggtggggggatggggggagggagagcattagggaaaatagctcatacatgctgggcttactacctaggtgatgggttgatgggtgtagcaaaccaccatggcacacgcttacctatgtaacaaacctgcacatcctgcacatgtaccgcagaactaaaaataagaattaaaaaaataccgacttacatttttttgtttgcattctttattcatatgggaaatctgctgctataataaacaaagctattcatttttcttactgtaggttctcctttctcccttccttggttaagcaaactcaccctagaaggggctgtttatccacaaatcctcagtaattaagagtcacacttgacacttaattttaaaatatatgtacactaaatagcataacattttaaaaacagctgattttaatctttgtacttgtacagtttttagctttttattagatttaaagagagaagaaaaccattttatgttaaatttttagtcactgttaagagaggtgttttattgccaatctctttaaaccacagccaggcatgtatactcagaaaattactttacataataatgactaactggaaaaactgataatattattgaaacattgagagaaatgttgtggggggttttaaaataaattcaacataggatcccatggcctagttttggaaagaacaactctccttcccgctctactggaatgcagttggcccagcccccgctgccttgcttgagttcccttacattgccctgggttgtgttggcttggaaggctgcctggccttgtgtgcttgctgggctgaaattactctccctgctcggctattgggagcacaccccatctacaaatttgtccacttgatttcactcctgcgcctctggagttgaaagagtagctcattaaaatgggaatgagccagagggctccgcagggctggtttgatcaacactgtccgtggtgctcagcaggacaacacagagtagcatttgcatctgaggacagtcaaacccacatcaccaggcttcaaccacaactgcagtaatagctaccatttattattttctacgggctcaatgctgagctaaacactttcatgtgcttttattaagctttaccttgacttcatgagctaggtagcatcactttggagaatgagggtgctttaagtcacacacttccacttccagggtatcaatgctgcattgaccacttcctagctttgtgactttgggcaagtggactaactcctggatgctcacatttacccatctttaaaatggggatatactacatagagctgttgtatcaagcaggataccatagtgcctgatacatagtaggtgctcaataaaagttattgacattgctttgctaataggtacttaggtttaggaaggtgaagtcacctgcttaacttcctcatgctcataaaacagatattttctctggccttaccaaaagatgaaccaaagaaagtaaagtagaaaaggtggtagatagctgataattttttaaaatgtgtttctagtatgctagtttgttatacatagtttcttggagaatttaaaagccgttggcttaatgttcattcactgtcaactaacactaggtaaacattcatagctgcaatttatattggtgatggtgcaaatggcagaaaattcgatccaaactaagcaaagaggaaggtattggcttatcagattcaaaggcccagggatgcacctgacttgaggaatggctcattgctggagtcagtgacattgatgggacctgattctctcttggcttttctttccttcattctcatacagtctcttcttggggttgcaagatgactgcagcagttttaaaactcatatcctttcagattctttcccaatgagggagagaatgtacttctttttcctaacttttgaagaagcatttttaagcctggccttcattggccaaaattaggtcccatgtccaccattgaatgaatcttgtggcttagatgatggggtaggaggattgggtcaggccattcagtttgctctctgttgaacctgtggctgtgtctaccttatacacaccaacagagcagaggtggcttcaccaaggaaatgtggagtgctgtttacctgtgtgaaagaacagatgccccatgacacaagcagtagaaatccactagactactgaatacataatgagtagactcacctatgaatgtggagacatctgcttcctttcttttcctatttcctgaaagttttctttctgcaaaatatacctattcagagaataaagaaaaaataaagaattatccttctcaagggaaaagagccatccataatgcagtcttttagattttctgctggtcccataaatattgcaatacattgtttatactcagaccatcatgtcatttatgatgattagcaggaactcaaaaggcattgactgacctggacagttacaatttgttaaaaatatgcattgtgatttttttctcatattgggggtcaacttaagaagttgactttgtcatttatacacagtttatttatccatggtaacagcagcctacagtgggcctaattataggcccactaattatttgcctttgggacagtgagggtgataaaacatgggttttgataagaaagtttggcatttttagtagtattcttttatgttaaaatgttgtactttgctttactcttatgaaaacactttttgttaaaaaaagaaatttgctatgaaggataaactccatttcaatggtgtatattagtcttcggcctcagtcactacatagctgctgtaatgtggttctggggaagcccatcaccagagcacgtggcagctgggagtggaagaagggtgcaaagagtaaaggaagcagagaggagcaagagcaaacatttgtgggggcctaagcatgtttcagaaatgttgcgtcaactcttatttcctcataacaaactcatgatgtaggtttgttttgtagacactgctgggcatctcactgatggctttttcccccttatacaccagcagatcctcgggttgtttggggtcatgtgatacccagctaaaataactacatttcccagctcctcagctcatgctcagtcatctgatagggcttctggtgaagccctttaataaggggcagaatatgttggcaacttgtcttttgcctcttcctagagtgtacccagggatgctcctggagattgagcagtcatcttggaactatgggctaataagacatagtaattagttttctgttacattcagctgaatgcaattcctaattagaaaaacattgttcatagtagttaattgagctttttagtgagaattaagcagtcactttttatattcagcctgggacccagcttcaccagtttttccaatttttaaaaacaaaattggaaatcagcttttacgtaaaattttgtcttaaaatattggtttgttttgtttgcttgtttgctttaaatactctgagcaaaaaaaaaaaaaaaaaaaaaaaaaacccaacatccatttgtaggccaccattttgccaccactggtcatttattgctttcatttattcacttaacaaaccatggagatgttgaaagtaattcagaagtgtgtcactaaaggactagagaataagactgtcaaaggaagatttttaaaacgtgagattattaaagttgaagaagagtgggctgtgcattggctaattaatagttttcaaatatatgaagggattttagacagctgatgttgactatcctttgtcttctgcagaatagggtaaaaaagaaaacacaattatttttcaggagaagaattttgaataaatgaataaatacgagaacagttttctaggtgctgagaattattaaattttagcagaggaaggggctgtgggcctttattttgtaaagtttttttgaattaggacagattatcagagagaaatttgtgtggttttggtgaccttggaattacctcccatctggaattttgagattcagattacttattctgaagggattcaatagctgcaccctactttttgtactcattgtgcactgcaggatgcaattcaagggaatagctgggaagtccgaagtggttttggattctgatttcttgacaaagtcgttggtacctcctaagccatcactgctccagttaagggacatgtggctctgaatacagggctccttttggagtctcccctgggatgtcacatcttctggtttgacagatgccaacttgacatttttctcctctttcattattctgaataattctgcaaagccctcatcctcccagcactatatgtactaagcgtgagaatttgccttttccacttgtcaaaatatgttaagagtttgtaggagtccaaggtcatgcttcagttttcagacagaagaggaattccaagaattccagaaatggcaggagatctcttttcttgctaactttggttcaggtgtgctttaaaaattcaacatttaatgggctgttaaatattccttcctcttgctgaggaacttcaagttattttaatatatattgagggttgcctagtaactacagctttactagcttactgagagaagttttactctttttttttttttttttttttggctacagaaaggcaatcaggggagagcaattggagatggcttcatggagaaaaggaggaggaatatggtgtctctttgggacttgaggtcatgtaaaactgatgttagaagaaacatgtaggtccctgtctgaggcaattagaagcaagttcaaggaaatcatcttccacttaatctttgcttatgctgaatagtttgagtgaatgatgtcacagggagttgaattaccaaaatgctcacctgccttcccccatttctccctcccttcctccttccatccttctttccgtccctcccttcttctcttcttccttccttcatttctttctttttctttttttaaagaaaataaataatcttactgttctaaggacctaacttcaggctctgagatatgtattagttataattttttttttaaggtgaaatttcactcttgttgcccaggctggagtgcaatggtgcgatcttgactcactgtaatctccgcctcccaggttcaagcaattctcctgccttagcctcccgagtagctgggattacaggcgcccgccaccacacccagctaaattttcctatttttagtagatacgggggtttcactatgttggccaggctggtcttgaattcctgacctcaggccatccaacccgcctcggcctcccaaagtgctggattacaggcatgagccaccgtgcccggccagttatgactgattttataactgaattatttctcttcttaattctgcttcttataacctagtgggaaacaaccaatgaacaagatgaaaatctaattgaaaccaccatttattttcctgagtcagtccaggtttgtaactaatttgtagattatctcaatgttgaactttgctgagttttgtgaggacatggagattttataagccaaggacgtagatatctctgggaggacattttcttgtctaccacagtacatcttgttgctattcattactaaatccttactttgagatcttaaaacagggaacatcctaccaatgtcagttcagatgcaaatttgtttgagcttgtgttctctcttgattaatacatttcagagagttaatttgtttaccaagaagaaaatcatttttttgtattggttaccaatgaaaagtggcatagtccaactaaagagagtacgcaaagatgggttttgtacctcctggggagatgctagctacccagaaacgtagactaataataaataagattactggccatcagccggttttgccaggtgatggcatgaatgttcaacgtatgcttttatgcaattctgtgatgctgcagtaattggggaaggcattagctgacagcagtccctgattcgatccatctctttctggctctggttacttctgactcataaagtggacagggaaagcaaaaggagaaatgtgtataatagtaaaatgttcacttgcagtgtgtcgtgtacccttaggctaaagatagacaagcatctcagaatctgggtcccatattctcatttccccgtatataattcctcaagtgggcagaagtgtatctggttatataatccagttatagtgggaagagaaactatgtttaaatatgcatagggagaaatcattgtcagctacagatacatatttaattacagtaagaaaaaaatatgaatttgaaaatgatgtgggggttgttttattcaaattggggttctaattcagtctaaaaaaaactgagcagtgttgttgaaatgattgcctcttagcagatagtatgtgtatatgtattctgtagctctgcctgacttaaagaggcttttacaacagatggaaaggcatagtgagagaagaaaataatttaaatttaaccctttgtaaatactctagctttaagggcattttgccttccttgggttgtgggtagagtatgctatcatatctgaactgtgtgttccccttataacatcctgtgctaagtgctcatgctccccaaaattcaggtccctctaaatgatggtgatgggaatccaactctgacagtttgaccccagatgtgtgctttacactgacccaagatatagcctagcaatatacgatgtaaaaattaacattaactcattgactcaactactaaataggtactaaaagtcaagctttttgctagacctgagaatatagaagttgaatttagctcttgccctcaaagaatttacagtctagggggtagacctgctcctaaactagcaattaagtctttaatatctatgcatttattctgcaacactgaatttaaaacaggtttttctcagaagcaattttgtttctacaaactgtctcctgggctcagagtccctcgtgttaccgagttccttgaaagccatgcttattgcttttaaatgcaacatatctcgggttgatgtttttgttctatagtaatcctttcattcccttttttatttgagagtttgaaaataatgttgtgtgcaaaatccctaaggaattagcagagctgatttgattcaaatataacttcccaccctgtgtgcagtgtcatgcccctgagtttcatatacatgagttctaaccccttcttgtctcttgccaagatttatcagcaattggttaacctatttgggttagcttagcttcattttcttcatctgaataatcggcataggtatggattctcacaagaatcagatgctattttacagaagttttataacaagcttaaattttgaaataaaactaaagcatcatgatgtaggcaacatgggataaaattgtagcctaaccactgtgtatgctggagtcacgcaatttgaattatacagtctttgaggtttcatatgttttagtttaaaggctgactttgccatttgtaagctgggtggctttgggtgatttgtttaatatttctctgttagtttccttattagtaaaataaaataataatgttttcttttataggctttataataacgatgaaggtgctggtggagatgataaagtgatgatgatagtgttggtggtgatgatagtgtctctgcagtggctggaatatttatgcaccccccgctccaaatttaaatgtggaaatcctaacccccaaggatttggtattaggagatggggcctttgggaggtgatgaagtcatgaatcacaaataggagtagtgcttttacaaaacagacccccaggtagtcatttatcttttcatcatgtgagaacacagctaaaagattgctgtctatggaccatgaaatgggccctcaccagatgctgaacttgccagtgccttgatcttggacttctcagcctccagagatgagcaataaatttctgttgtttataagccatccagtttatgatgttttgttatagaggcccaaatggactcagccttacagttattaagcccttccttcttgccagtactgtgctgagtactctacatgcatcacctcatagcattctcagttgccccctctggtagctactatcataatccctattttcttttttcttttttattatactttaagttttagggtacatgtgcacaacatgcaagtttgttacatatatatacatgtgccatgttggtgtgctgcacccattaactcgtcatttaacattaggtatatctcctaacgttatccctcccccttccccccaccccacaacaggacccagtgtgtgatgttccccttcctgtgtccatgtgttctcattgttcaattcccacctatgagtgagaacatgtggtgtttggttttttgtccttgtgatagtttgctgagaatgatggtttccagcttcatccatgtccctacaagggacatgaactcatccttttttatggctgcatagtattccatggtgtatatgtgccacattttcttaatccagtctatcattgttggacatttgggttggttccaagtctttgctattgtgaatagtgccgcaataaacatacatgtgcatgtgtctttatagcagcatgctttataatcctttgggtatatacccaataatgggatggctgagtcaaatggtatttctagttctagatccctgaggaatcgccacactgacttccacaatggttgaactagtttacagaaccaccaacaaactaccatcagagtgaagaggcaacctacaaaatgggagaaaatttttgcaatctactcatgtaatgaagggctaatatccagaatctacaatgaactcaaacaaatttacaagaaaaaacaaacaactccatcaacaagtgggcgaaggttatgaacagacacttctgaaaggaaggcatttatgcagccaaaagacacatgaaaaaatgctcatcatcactggccgtcagagagatgcaaatcaaaaccacaatgagataccatctcacaccagttagaatggcgatcattaaaaagtcaggaaacaacaggtgctggagaggatgtgaagaaataggagcacttttacataatccctattttcaatgagaagttgaggcttgtggagttgcttaacatgtccaggatcacctaatgctccaacataagtttgattaactttaatacttttaatatatattgtgtctcagttaatgttttattgtgctctagtagtttaaactgcgttatcttgtatcaagaattcaggtgtaataaagattaaaagggacatgatgtatgtttaatatttagcatctgttccatagtaaatgctaaataactattagatatttaattggtattagatctatttcttttttaacttataaattataatagttattgattctattattgcctttaaaatttaaaaccattctgaaatgatgaaatggtttattctcctctataaggatgcaaaagttactattgcccatatcactgaagatgagggaatgccaagatttttaaaatttctacagaatagcaaaaatagtttcatcatttaggtcaaagtttcaagtttgagtaaggcttatattcatttttttcaaataactagcttgtatttttaaacaaatatcactaaagtctataatatcattatcttatgattcagtaaagaaagagaaataagctgtttaaatatgatgccatacaaattcattcaaaagagaatgatgcattcaataactatgtttgtgaatttggctctatgctatgagatacccaatttgtcttattttatccttgaattcatacttctttaagcttcaaggagatgtgatgcattagaaattgtagattatctgtggcaaatttgactccaggcttttagtaacacctcatttcaaattctcaaaagagaatcctgttgtcttaatgttttggtcttcgacatccaagtgtgttttaacctctatggtgcacatacctgcccaccactgctccttgacctgcagcttcactgaacatttgaactcttgttgcaatgcttatgttattgggcccctccacatccttgccacagttgattgaaccaaaggcaactcagtagaacactcctaatcctgccccctaaaccctccccgtaagtccttgtcatctcagtaaacgacatctccaatcttccacttgcttaggttatcaaccttaagtcactcttgagttctctctttttctcacattttattagcaaattctaagccccttatcaaattccattagctctgtgttcaaaacacatctggatatagtgattgatacccctgttgtttccactctaggtcaagatttcatatataatcacctgggctattgcaatcaccttctaacttgtttccttttctacccctgcccatttttgattgaggtgatttttgagactgtaagatcataccactcctctgctcaaaattctgcaagtcttggccaggtaaggtggctcatacccataatcccagcactttgggaggtgaaggcaggaggattttttgagctcaggagtttaagaccactctgggcaacacagcaagatctcatctctactaaaaataataataaaaaattatctgggtgtggtggtgtgtgcttatagtcctagctacttggaaagactgaagcaggaggacttgcttgagcccaggaggttgagtcagcagtgagctatgatcatgccactgcactccagtctaagcaacaaagcaaaaccctgtctcaaaacaaaccaacaaaaaacaacaaaaaaacctacatgtcttatattttacgtataataaaatacagagtccttcatggcctctgaagtttcccatgattgtgtgtctgcatccttctgtgatgtggtcttctatcacccttccctttactctgtaagctgacttgctttttcttaattatggtagacacacttgccccagggtctttgcacttaccctctcctaagaatgatctttccctgcttgtggctcggcttgctcccttacatcacctggccttctggttgaatggtgcctgcttgagggacctgtgagcaaccttcgaggcagcacctctctccctcatggcacttaccatctgttatctggtatcatgtcacttttcaccagctgtggtatcctttttttaatgacatgacttctgacatcacatttgctgttctctttttccataccaattctccaataataattagtgctcagcaagttaattcaatgctggtactaactcctggagcttgtagagatcccgctggttaaaggctcaatcccacaagactgtccctacttcagacgccaaccacaagggggtcccagcctacccacacctgtttagcagactagaaatttataggttcccattctcaggtttcataattcactagaacaactcacagaactcaagaaaacactttacttatatttactggattattataaaggattcgactcaggaacaggcataaaagaaatgtatatggtatggggtgtgatgtgaggagcttctgtgtcctcttgagggatgccatcctcccaggatctcagtgtgttcaccagtctggaagctccccagatcttgtcatctaggtgcttttatgaagatttcattacttaggcatgattaattgaatcattggacattggtgattagctctatctttagctcctctccagctggggttgggactgaaagttccaactctccaatcacaacgttggttcttctgcccagttgagagtcacctcattatcataaactcaagactggttgaaaggggctagttttgaatcacaagagacactcctaaaattccagtcacttttgtcactcaggacattccaggggtttgggagtctctgtgctggaaccagggacaaagatgaaatacatgtttcttgttatatcacaccagccaaactgcttcatattgttcttgggtgttgtctgtccccacttgcaagaacttagctctacagaaacaagtcacttttgccagttttattactggtctcatttagcaccccaagcagtgcctaatacaccacagaccaggggtgtctgatcttttgtcttccctgggccacattggaagaattgtcttgggccacacctaaaacacaccaacactaacgatagctgatgagctttaaaaaaaagcacataaagatctcataatgttttaagaaagtttacgaatttgtgttgggcggcatttaaagccatcctgggctgcatgtagaccatgggtcgcaggttagacaagcttgccatagacactcaatcagtacttactgaatgaattacttacgtgaattaaattggacattaattaatgcaatacttcatggaggaagaccataggtagaggcagacatgagtgaaaacacgctccatgagggtcggagacagagaaggagagaaaacaaagttgttttctttttctttttctttctttctttttttttttttttgagacagagcctcgctctgttgtccaggctggagtgcagtggtgtgatcttggctcactgcaacctctgtctcccgggttcaagcaactctcctgcctcagcttcgtaagtagctgggattacaggcgtccactacctggcttatttttgtatttttagtagagacagggtttcaccatgtcggccaggctggtcttgaaatcctgacctcaagtgatccacttacctcggcctcccaaagtgctgggattacaggtgtgagccaccgcgcctggcccaaagttgttttctgaagagctttctggttggatttttactttttcatgatactttgttttacttctttttcttggaaaattctctgagctttgcctctgtcctgaaaacaaattctccttttcttaagtaaggttgagtgggttttccatttgttgtaagccaaaataccttggcaaatgtaatccttctaagcctattagagtaaaaaaagtatgtctggtacataataggtgctcaaaaatatttgctgaatgaatgaatgatagctacaaagagaaaggcttgtatttcctattggcttcagggagaaagttctaacacatttgattcctggccattgtagtgccaaagtcagaaatgcattaagctttctgaaaggaaccatcaaacttggcctctttgagggcacttaacttcaaagctccaatagaaatattacaactattaattaaataactttattttttgggctgggcatggtggctcaagcctgtaatcccagcactttgggaggccaaggtgggtagattgcctgaggtcaggagttcgagaccagcctgaccaacatggtgaaccccatctctactaaaaatacaaaaattagctgggcatggtggcccatgcctgttatcccagctactctggaggctgaggcaggagaattgcttcaacctgagaagcagaggttgcagtgagccaagatcatgccactgcactcaagcctgtgtgacagtgagactctgtctcaaaaaattcaatcaaccaaatcaaataaataaataactgcctttttttgttgttgctttgagatggagttttgttcttgtcgcccaggctggtctgcaatggcgcaatctcggctcactgcaacctccatctcctgggttcaagcaattctcctgcctcagcctcccaagtagctgggattacaggtgtgcaccaccacatttgtctaaatgtatttttagtagagttggggtttcaccatgttggtcaggctggtctcaaacttctgacctcaggtaatccacatgccttggcctcccgaagtgctgggattacagacatgagccaccgcgcccagccaaagaaatgtatttaaggtcagcatcagggactgaattttttctgcctgcagaattgaaaactgtggatgctgttctgtgaatctccttcatagcaggcttgaaaagttgttctgggactaaacgtttgttaaatgggggttaacaatggttcactctgttcacctctcaccctactccatgcatctcccagttctagcccaacgtttatgccctcccactgtgagatgatggaaggctgaggggagaaaagtagtgtggtggaggaggggagaaagattgtgctggggaagtctgggattggagaaacagaagggtgttaatgcgaaagaaggatgaagtgaggggcagcttagcttcaggtaaagatccaactcgggatgtttctcactttgcccctttgttctcagaatcagcgtggttcacttgacaacataaacagatatatgctgttaaatggcccattagaatgcaatgaacatgagcaggacttaccctttgaaactgaacagttcctggaaactcctaactctgcttttctgaccacaggctcctctcgaattatctgattttaggaaaatctattagctgtgactaacactgaaacagcctattgtatgcctcaggacctgccttctctcctggaaccatactgtggggtagctatgaagatgttggttgtatttccttcattattcaataggaaaaactgagaccaagaggagttagagaatgtgtttgcccaaagtcacacagtagaaggacagctggctttcaaactcagctttctctgactattaaagccaacttagaacatacagcatttcttgaagttttaatattcttcctctcctaatttgttttttctttcttggtaactaattttcactaagacagtttgcatgctcttgagcttatagctgaaactgatctatgccagtctttctttaattaaaaatcaggccttaaaagggggatggaaaaggttgagtttttgtcactttttgcagcttgtatgttatagtgcttggctgtgatttgttttcagccagaggacagccctttggagaagaacattatttgagggtgttcccaagcgggtgatggtcactgtccagtgggagagcaggcggaagttcttaccctgctcacatgttaaataatccaagtggcattgctctgagcacttgtgttatttatagtgggtctaattatgagtgtccttgccctgaaaggaagttgtcttccccaagggtgggtgacagactaacaaactattgagctctagcaggagaacgtggagtcctgtcctcttagttggttgaaaatcattaaattacccacctgattaactagcgggtacagaggaatattacaatattacagggacaaatgggaatatactaattgggtcaagatgaattcccttttggacttgaacattaaaattcttattttattttcaaatatgcatcctttgaacgtatttatgcagggaatatgcactgtcagagaaaacatccattgaagtaccctaaagagcaagtaacatatggtgcttttgttagtttttattactgcactttatttctgaatagctgataataattgtgagacacttaaggctacaggtaagaaagaatatggaaaaatctagatgcagatctggtcttgagatgttaaagcctgttactcaacctgttggaagtttcttcctctacaatggagacaagaataatattagctgggagagttaaataggctacattgatgcagaagtccagattttaggcttttactaaatattgatcattattctccatttgaaagtaaaccatgttttactgccaatttttacgatgaaaaaatttttgtggttttgcaaaggtaatttaggcaatcctttgatctccgctgaaatgatagagggatttgttagaagttgtattcaggccttctaatgcttcccatttgctgattcaatgtatttggaagatttgcctacagattcggggccaaacattgagacacaaatagactttttgttttaaatttgtgcacttgagtgtgatattttttcatgccagcttccagtgacaggctgcatagtttattttctgtggcaaccactttccctcactaagttttactctttaagtctagctgcctctcccattaaggttcacccttctctgatctctggcccagaagcctgcgtgaaagtaaaccaagatttttctttttttttttttttaactatttcctgcattcctctcttttaggtttgatgaggtcagatttcagaattgccaagctgtttcttccttcctctattcataatgttggataaagacaggctgtttaaagagcactttcagtctgaggggtgtcttttctgtgcattgtgaagggtgaggccccaaagctgggacgacgacggcatggcgccaggatccatggagttttagctagtgaatattcaggaaagaaatgtatttgtgtcctttgatccagagctggctacccagggtgctggctggcaagtgaaaggaaacatggaagctgacaagtctgatgttaaagaacattaggagttgtgattgtcttcttaggacccaaactgaactttcttgctgcagactcttggtttgcttatgaaccaagtgagtacttggcagaaaccaagtatatgggatttttaaaaaccccaaaatttaagaacacaaagaagatgtccaatttctagaagttccctagagccatgtaattaaactgtgtgtttttttcagaaatacctggaacacctccattttccaataataggtatctctttatatacatggctgtgtctgaactcccggagaaaagagtagggctgtctgttttcgaaaagcagtctttttttccctttctgaataccagagaaagaaaagtgcaatttcttattcagaggtggagatgctttaagatcaattgcttaactagaaggaggtaatatctatgaaacaatgaggttatagttattatagtccatgttacatattgaggtacaattttcctggtttattgttgttgtttaattttactgggaagtggttcaaaatagttgaggtttctgtagaggtctgataaggatactgagataattgtagttttagaggaaagaacaattcacgaaagttatttccttaatatttctgtctaaaattaaaagcttgagcaacttgcctgaaaacatggattttgaatgatatatggggtctgtttgacccatataattgcaattctaattccaatggcaaatttcaggatctttcgttcagaattcaccttctgtttgagaatggccattttaaaagttttttttaaattcaatttttttcctctacaattaatagctattttatggtttgactaatggagatacatttcaagcgtacattcatgtgcttaggattttatgaagcttccttacacttgcaattccctggctgttaccaggaaacagccctcagctcgctgctttcacagaaccatatattgttatggcatccacagctaaattcaaatcgaagagcaaacctctcaggtttgtgtgctattaggtgatacatgcttcagttcccactatgagggaggtcaaccccagagagctttttgttatttccccaaaatggaagctgggaaacaaagttgcttccttaagaataaagtaaaacttacttccctgggaaggtggaagtgagtagaaatggatttgagaaagaaagaacattttaaacaagaattcaacaaagtggcaaaggaatacagggaaccagtttgtgtccaccagtaagatttaaggttggtgtatccttgcagtggaaagctgtgtatgcattagaaaaaaatagttagggctatggatattaagtggaaagttgcctttgatttgctttctacaggaagagtaaaggagaacactgtggaacataatacatagttgatgcgatcctcttaatttttaaaaatacacacatatactgggcgtggtggctcatgcccgtaatcccagcattttgggaggctgagatgggtggatcacctgaggtcaggtatttgagaccagcctgaccaacatggtgaaaccctgtctctaccaaaaatacaaaaagttagttgggcgtgatggtaggcgcctgtaatcccagctactcaggaggctgaggcaggagaatcacttgaacctgtggggcgaggttgcagtgagctgagatcgtaccattgcatccagcctgggcaacaagaatgaaactccgtctcaaaacaaaacaaaccaaacaaaaactcatacatgtatagataaataggaagatagaattatatctctatgggaattagctttggctgcagataccctcaaactcagaataatagtagcttattaaggtcgtttagttttctttcatgggaaagaagttaaagttagtatcgtagttccatggtcaacaggaaacctggtatctttcatgtgtctgctccaccattcttgtatacggcttcccacctagaggttacctcatggtccaagatggctgttgaagctccacgcatcatgtatcttcatgaccagaaaaaggagggatggaagaagagtaaactaattttgtcccttctcattttaaaaaagccttcttggaaagctcacacaaaacttcttatatctccttggccaatatttggtcacttggctttacctggaagaatagaaaatacagtccctcagctggcacattgccgagggttttgtactgccaaataaaaagagaatgactgctgggaggcagctttttggaactgctgcaagtggcttcctttggtcactagaagtggagatgaagagcgggaacccttccattttcttctttatatacttttgtactgttgtattttaaaataatgagttaaaaaaaaagcagagggatgcatattttaaagaagaaatgaaaacctaagtggagttgtggtaagtcatcagtccaagattagcgacatgatagaaaagatgattctctatcttgcttggacctactctttgatgttaaagcatctttgcatctttgaatggatcacctcctgcatgactgttctctgggtcctgagcagggagagacaaccaggtgcatacacaatttggatttcatggtctttttatctctactaaaactatttgcagagatacagttctaatgacaaatgctaattattggctgtcacttagccttctaatgattaaatgcaaaggcattagggtgttaaggaagatagacataattataataataagactaaaatatatggaatgctttcttgaagtagtatattccattgaacaataattgctcttcaattgcagttttaatattctaaacctcaacttctcaccttgaaatactactactaataatagttcctttataaatcatggaattgttataagagttaaagaagataatgctgattaggtgacaggctgtcccttaataaatgctcaataaatgcaagatgaggatgattttattgttggcatagcatgtgccaggcattctgtaattattttgaattttacccccaacaacaagtttataagggtgactttaaaaaaaaaaacagcattattgggatataattcatataccataagattcatccttttaaagtgtataattcagtatttttagcatatttacactgttgtgtaaccatcatcacaatgtaaatttagaacgttttcatcattccatagagaattcccgtacccattaacagtagtcacttctcattttcccttccatcaatttctgaaaaccacaaatccactttctgttttcatgcattggcttcttttggaaatgttgtataagtgaaatcctacaatacatggtcttttgtgtctggcttctttcacttagtacattgtttttgaagtttcatctatgttgtagcatgcattagtactgcattcctttttaaggctaaatgatattccattgtgtggatagaccacattttgtttatctattcatccatttatacatttgggtttgttaaattaagtttagcctacaactgtctctttttatatattttaagtttagcctaaaggttttttgtcaactgtagtttactcttgtgtcaattactgaattttggctaatcaaagatgaccaactgtttaaatcatgcacaagtgccatggtgtgaccaatttggctatttctgtatctcacttttgtttctttgtcctttatttggtgtgtgtctataaatccttttttactatgtggctatgctaaagtctctgtaagcctattctggcttgagagtctgccctattactcattatttatttgacatattttgagatggctgttcagggggccagcagacagaagcaacctgcaaagctgttttctatgggcgagatttgcatctgtagagagtctacattgaggcagccaaccctacccttgtcttgatctacggaagattaactgagagtctgacacctttaaagaagaaacatttactatctcttctctctgagggctgctacctgtttgatttcatttacacaagaccacctttgctaaccaagcctcctcttctctacttcccatgacctgtcttgccagtctaacctggtttatcagcctagcctaatttgggccatcctgagccctcattctttctgtaacctcaagatggtttataagcttctgcaccccatcgggtagttggggtattcactctgtggttctctcccatgtgcacgttaataaatttgtatgccttttcccctattaatctgtcttttttgagttgattttttaagacagcctttagagggtgaagggaagcttcctttcacccctgcaataccctgtacacccattatttcccaaatgtaagaatatatatgacccacataagaatataagaataaaggggtaagctaagttcctgtgagcggaattgcaggatcagaagatgtgtatattatgaggaacactcttgtcaagttgcccttccatggagactgtctgaaccacactcctatgtgttatgaagagcttgaggcaatatttctgtctggaccaattataaagaatagttgtgactttcctcagtaattggtttgtttttgtcttatggagaatgttattcacaacttaccaagcttggattatgttgcttgcttagagcctttgtggtccatcatgaatgtctgtgaaactatattctgaacgtttgttagtgtcactccactttcatatattatgtggtattggaaaagcctttcactggagcttaaaattctcactcaggtgaatcttgagtcaatttcaattttagtcatagaaccccagagctccaaaagactaaagcgtcaagaacctagtttatagccagggaagtctttcaattttgagtgagtttgggtaaaattcactatagatagaacacctaaggataaattgatattatagaggaaataaatcaccagcttctctcattttataacaaatcagagtaagaatgccattccagggctttgcaatattcagcaacctcctacaagcttctttttgtctttggatacaaggaagatagaagttgagtctcttgcctccacgtattactattggagacaaagtcttggggaagtcaggttccaattagtttctaggggaaaggctctcactttcttcatatcctttgaaaaagcaatccagtaaaactttacaaagtttccaagaaagcgcaaagaaagatttatgtgaatgccactggctctactgatgttatgtattctttaagttggggattcatttatttcttcattttacttggaaactgttttgttttgtgctcaccatgacccaattactataatttgagcagtgcataaagcaggctctgcccctcatagaatttacagtctaaagagagataattatacaaacaattactttaagtgtagtttgtttatgatggagaaaggtcatgtgttctgagtgtggatgagaggggcctctcatgtaattgatttatgcagcaagcatttgttgaatacctacagtatggtgatccctgtgctagagctggggatacagtaatgaaggctatagacaaataccctccacctctggaagttggagtctagtaagagcatctctcatttattaaacacttatattccaggccttgttctaaggtgatttaaatgtagtaactcatttgaccctctcgacaacccagtgtggtagataggattacaattatctcatgaaggacagagaggttaaacaacctgcccaaggccacactgcatgtacattttggaattaacctgctcgtgggcaggtgggctcctgaggttgtgttcttgactttaattgtatatgcttctccctattctgtgtttatagagaagaaggcattaggagaggtttcctagaacaagtaacatgatacataaaagataagtagccaagtggaagggtgtggaatgggaagattgttccacatagatgcattgcgcccaggtgcaagaaagaaggtggggaaggtggcaatagtttcaggaaagaaaggagcctggtgtgtgggaggctggaggtgggtatatcttcacagcttggcacaagtcttgtaggttgcctgcagactcaagactttatgtgccgggactgctgctgttctcagcctctgttttgtttcttttcatactgagtgatcttcaccgtgtcacttttgctcttgttttctatgtctgcctgctggcagtgactttgctagccaggatcaagtttgggcaagataccaggaggctcagagacctgcgatctgagtggcatttcctcaggccttgtcctgacctcctggcccagagctaattgtgctacctaagtttgaaaatgctttaaaatttcaagtatatcctcctgggacaactggtatgtcttggcttgataaacaagttgatatctatgtctacctgatcctaaggcatttgccactctaatttgtcatcttgttggtttccaacgtgacaagtactttggttgtacattgcctcatccagtagaccaaattctgattaattattccttttaaatctgggataatggctttaattttgagaatcctcttctttgcctaatgccttccttttctcaacttcaacaccattgacatttttgttgcagaaaattctttggtgggggctgttttgtgcgttgtaggatatttgcctgcatccctggtccctacccatgagatgccattagaaacccctctcagttgtgatgaccaaaagcttctccagacattgtcaaatgtccactgggggacaccatcactcctagttgagagctattgctgtaagcataaaggaatagtattcttcacctatagtcctgtgtcattgctatatggattgtgtttatgaactggatgatgtattataagaggccatttcacagcatttcaataatttgaaatttaaacatttttttctaacctattgtagttaaattaatacaaataataaaataataaaacatccaattaacaaaagaatgcataataataaaataatagctaaccttattaagcactaagtattgggtaccttatacacatagctgtaagttctgcactaccattatcatcattaacagatggaaaaactgaagctcaaaagggtaagttatttactcaaagcagaatgacagtattttttttactttaattctatctcaagcttctcatatttagagcttaagctgaacctctcttaatattaaatttgtgatataataaacaatatttttatttctgattttgtttattatttgcttgatgccagaagataaattactgctttttctaggaggacaattatatttttgattaatattgtaattttagagaaagtggattcccaaaatgctgatcatttttttcagctagcagtatttatagacagcaaccatactataacttatttgataattatctaatttttgactatttttctagtggattattaaagtattactttattgtcaggagtaaattcctgaagaatgaattcaaaaagaaaatagccagtatggctggactacccattataaaacatggatggtggtaaagattcgtttttgatcaaaccttgggaatttgagctcagggtgcaaagcagggcttaggagagagatgaaattgatttcaaatcttttttgcttctttttttgagacagggtctcactctattgcccaggcgggagtgcagtggtgcaatcatggctcactgcagccttgatccctctgggctcaggtgatcctcccacttcagcctccagagtagctgagactacaggcgcacgccaccatgcccagataatttttgtgttttattgtagagatggggttttgccctgttgtccaggctggtcttgaattcctgggcccaagtgatctgcctgcctcagcctcccaagtcctgagattactggcatgtgccactgccacatttcaaatgtgactccataatgtattagctgtgttaccttgatcacattgcttaagtgtctgagtcctagttgtttaatttgtataaactggacattaacaggtcttagctcacacagtttgggtgacatttaagtgaaagcatacacgtgaaatacttagttgaatacctgtcaactaagcagtgaagatctgtgaggaggaggatgatgatatattacaaatagtgtgctgacagtgcttaatatctctcatccttaaaacaaacaacaaaaacaccttgcagatgctgtccctttcatatctcttcacaacaagaattgattttgaaagcatgtttctttctttctttctttctttctttctttttttgagatggagtctcactctgtcgcacaggctggagtgcagtggcacgatctcggctcactccaacctccaccttccaggttcaagcaattctgcctcagcctcccgagtagctgggattacaggcatgtgccaccacgcctggctagtttttgtatttttagtagagacagggtttcaccatcttggccaggctggtcttgaactcctgacctcatgatccacccgcctcaggcttgcaaagtgctgggattaaggtgtgagccaccacacccagccgaaaacatgtttctttcctggaagttatctgtgaaaatctgcaactgtctcctctatggccacccaggtttccttcccttaaattcttggcttaaatttttttaccacatgacaattattcttccccttctgcccttttctggcaacatctgttccttgtgggttttttttttaaagagtgctttctcaaccatggaattcatttctcttcccttctttgagactgacattctaattttctatactgagccttctcacaaaatgtcttttactgaatgttgcttcaataatgtggaggttgagagactgaaccttgctgaaatgtttccttgtgaaattattacagtgattcaatttcagaacagacattttttaatgcaaaatccctaatttgggatttttttttttgccacagtagagtgatatatctccagttttgctacagcttgtttttaacaaatatattctatatttgttttatctatatggaaatttattcatcttgaggttctgtggttttagaacaaaactcactgatgtttgaaaacattgatgtgacaaatggccagcagagcccttctccatggtataaaaagtagcacttggtacaatgaactttttaaggaaaaatgtgtggagcaattgtttaaaagaatgtttctcttaaaacaatgtctctcagtatgatttgaatatttgtactctacatattctggactttttaaaaaaaataataaacctcttatataaatatgttaaggcatgtttggaaatgtcaggcctattctgaggcttttgatccaagggcctcatttatgaaattctgggaatttcatgagttctcagtatgacttttgcccactcatttttttgctcatttgtttattcactcagccattcaaaaataaagaaatgagaacataatactcttccaggccttgaggattcaaagtgattcagataaaatatagtgtgtttttatattctaaagaccaaggcaaaaactaaaaatgcagacaaatcagtaagcaaaataatttaaggtattgacttgaggtcaatttgtggaggcctagggggtgctttagatttgggagatgggaatgtgtctctgagatggtgacatcatggtagactgtgagtgcatcagtggccttagtcactgccataatctttgctttgtgactttattgtctccatcaactctgactctgggtttaaccatgtgagataaaatattagcaaacttgacacagcaatggcttataaaagtatttacaggcttccacttttgggaacagtgagtaggtgtgccttttcttactcctctcgctgagactataaagctgggacattgcatgtaaatcaaacctaagaagactctgaaaggtggagagaagaagttagccagactaacttttgcctcatagatcccacacatggaggtaaagaagccaacaacccagaaaccccaataggcacacacaaaaaaaagtcccagcaaaagcctgctctccctggccagaggaccaggaagtgtggcagcctagcaaggcaagaaacttttagataagagctgctctataccattcaaacactaaagaagagactgtggccccaccctctccaatgaaggccaagtgggggacctagtcttccaccctcatgagactgtaatgagttatcccaatacttcaccaagatgatgtctgtgaaggccgagtcaggagctcagactctcatccacacccatcagtaacaagtcctccacaccatggtgtctgcggagaccacatgggaagcctggacttctaattctgctcagtaggaatgaggtgctccttccttccccactagggtggtgtcagaggagacctaatggaatcagcattgcccagtggtaatgaggccactcctactgcagaaccagtggaggccgcatgagcagacagaatccctaccaccccaacccagcaataatgcgggggcctgtcaagtatcattatcaataatgaggggccccgtcaagtatcaagtatgattttctggggattctggatttctaccagcagcaacaagaaggcatactttcctaccccttctcctgttgtagcaacattagaggcatcctgttgaaagagatttatttaagatctagaacctcataacataatgtgctaaatacttaggtttcaataaaaagtacttattataccaaatcaggaagctctcaaacaatgaatgccaacacagaggtgatagaattatctgacaaagatatgaaaagagctgtgataaaaatgccccaaggagcaattacaaacttgcttgaagcatgaggaaaaaaattgaaaatgttctcaagagaaatgagatagaaagaaggcccaaatggaaattttagaactgaaaaatacaataattgaaattggatgggctcaacatcagaatagagagaacacaggcaaaatagaccgatagtaatcatccagttggaataacagagaaaaaatagactggaaaaataatcacaagagtttcagggaccttgtggcattgtaactaaagatctaacattcatgtcaacagggcccagaaggagaggagagagacatgggactgaaaagtgtggaagtcctcatctaccattgctgacagaatcttggaaactgtgactttaagtgaaatgatgtacaagttctttttttttttttttttttttttttgagacagagtctcactctgtcacccaggctggagtgcagtggcacaatctcagcttactgcaacctctgcatcctgggttcaagcaattctcctgcctcagcctcctgaatagctgggattacaggcacacaccaccaaacccagctaatttttgtatttttagtagagacggggtttcaccatgttggtcaggctggtcttgaactcctgacctcatcctcctcccgactcggcctcccaaagtgttgggattacaggagtgagccactgcacttggccacaacaagaagttcttgagtaatgtcgtttcattattatggtgagaaaaaaattggttttattatgcactttttttttttttgctttaagtcacagtttccaagaacctattgatattaagggaggacctaataaactcaatgaaataatggctgaaaagatttggcagaaggaagtttactcatccagtgctaagagaaaagaactgtcaacccagaatcttatacctagcaaaaatgtccttcaggaatgaaggggaaatcaagacactgtcagatgaaagaaaataaagagaatttgtcaccagcagatctaccttaaaaaatagttgattaagatttctaaacagaaaggaaacaatacaagaaggaaccttgggacatcaggaggaaagaaggaactcagtgagcaaaaatatgggtaaacacaatacgttttccttcccctctcaagttttctaaattaggtttgatgtttgaagcaaaattataacattgtcttctatgtttctaactggatatagaaaaaatatttaggacaatgataaataggagaagtaaaattatgtgaagggtggtaaagtttatcccagagaaataatgacttatggtcacacaaaaatctgtgtacgaatgtttttagcagctttattcataacagtcagaagctgaagaacctagatgtccttcagtgaccaaatgggtaaacaaactgtgttacattagtacaatggaatatcatcacctgggtgaatctgtagagaattatgctaaatgaaaaaagccaaatcgaaaaggttacatactgtatgattacacacatataacatcgttgaaatgccaaaattatatcaaaggagaacagggccgggcaccgtggcttacacctgcaatcccagcactttgggaggccaaggcgggcagatcacaaggtcaggagttcaagaccagcctaccagcctggctaatagggtgaaacgctgtctctactaaaaaatacaaaaattagccaggtgtggcagcctgcgcctgtagtcccagctacttgggaggctgaggcagaagaattgcttaaacccgggaggcagaggtgagatcgcacccctgcactccagcctgggcaacagagcgaggctccatctccaaaaaaaaaaaaaaaaaaaaaaaaaaaaaagtggagaacagattagtggttccagggcttaaggcaggcaaggaagtagttgtggtaatgaaagggcaagtgagggatcctcatgatggaaatttttctgaatcctgcctgtatcaatgtctgtatcctgactgtattatactatagttttggggcatgtttcccttagaagaaactgagaaagagtagctacaatctctctgtagtatttgctgcaactgcctgtgactcaactattatctccaaataaaaagattagttgaaaaatgaaaagcattttcaatgtctgtttgctgtcatgggctcccgcttgctccagaagaataagccccagataggctattggagaatcagacgccatgagccacagagctaagtcattccaggcaaccttaagacaacccaggacttgactgctcatgtgtgaatgaacccagccatgattaatgaagccgggtcagatcagccaaactgcccaatcaacagttatattcatgggaagcgataaattgttgtttaagcagctaagctttggaatgattggttatgcaacaataactaactgatagagaaattccacctaagacgtgaaggaggaaaaggagtcaaccacgtgaagtgcagcggaggaaatattctcttatctcttgtcagagaagaatataacactttggaggctggcctattatgagtgaagtaggaagtggtgggatatgaggcctaatgagtaagcaggggtcagttatatagggtaggctaagcaactggaacttagtcttggtgactactcagaacacctctctaagtccctttggaagccccagggagatcattgcttttttttttcaactctacaaaaatacctattgggtgcataccacaaaatgagtgctctgcatagatagtctatcaccattatgaccacagacctggtgttgtgcgagggcctggagtgccttgttatttgtccctacgtaatagaaagtaaagtttctggactttgctttctgtactgctctttcctcattgcttgggacagtgtctgtcttgtaattggtgctcagtagatatctgcagaataaatgagtaaatgaaggaaacaaaatgtgttgcccttgtttgcatgcaaatcaccacctagctggatggtatgaactgctaaccactatggagtgtttgctatataccaagcaatatgctaagtatgttatttatttatttgtttattgagacagggtttctgttgcccaggctggagtgcagtgcatgagcatgactcactgcagcctcaacctcctgggatcaattgatccttccccacctcagcctcccaagtagctgggaccacaggggtgcaccaccacacctggataatttttttatttttctattttcttggagatgagttatcaccatgttacccagtctggtcttgaactcctggcctcctgcaattcttccacagtggcctcccaaaatgctggaattacagatgtgagccaccgtgcctggccctaagtactttacatgcactgacatattcaatctcacacagccctatagggaagataatattattgtgtttatagagtgcaataaaatcttgtatatatagtctcatatacacaatgtatacagaactacttcttcattatgctattaaatataatttttatacaggcttagatatttaataggtgtgacaagctcaatatccccatccccaaacttcacacctccctactgaacttcgtccttttccaggctttctcagctaatgaaaactccattctcccacttgcgtgagctaaacattttggaatcatcctagacttttgtcttaaccttacccttacattcaatcccatcagtaaatcatgttgattataatttcacaatatgtccagattcttagcactttccacttctcctccactttcatcgtggtccaagtcagtatcaccccctgcaatgtttgttgtgaccccctctaactggttccccgacctgcgcctttcctgccctacggtacctgaagttggattatatcacttccattcaatgcttcgtctcacttcccatctcagtcagagaaaaaaccaacatctttactcaattatttatttttattttttactttttttgaggcagagtctagttctgttgcccaggctggagtgcagtggtgcaatctccgttcactgcaacctctgcctcccaggttcaagtgattctcctgcctcagcctcccgagtagctgggattacaggcttgcaccaccatgcccggctaatttttgcatttttagtagagatgggggattcaccacattggccaggctggtctagaactcctgacctcaagtgatccacctgcctgggcctcctaaagtgctaggattacaggtgtgaaccaccgtgcccggccaagccaacaactttagtgaaacccataaggtctgaccgtgctgacccacgctcaccaccactgccagccctgaactcttctcctatcttcaagcttctttattctccctttaacatgctggacatgtgtctgactcaaggccatttatttcttccacctagagcccacctccctcacatatccactctgttgattgccttgtctctttcaagtcgttgctcagatgataccttcttcatgagaacttccctgatcatccctcaccctatttaaaatcacaatacccaccactagcaattcctatcactgtccttggtttatttcccttcgtggtgcatcacaccatgagacatattataagatacacacacacacacacacacacacacacacacacacacacgcatgtaagcatatatatcttattgattgtatgaaagcacaacaaagacagcagattttctcccttttgttcatagccatagcccctgtacctaaataatgcctggcacatggtaggcacctgataaatatttgttgaatgaattaaagaatgatatcagctctcaaatttttgtttaaatagaatgctcacccagtattttagattttctggcatttctttagtgtctttacttttttctataaaactagttagaaatcgaagctagacaaataaatataacaaattatggcttctttctgcagtgcttctgctttggagaagagaaaggcattggagacagagaaggaaaagcatatataactttctgttttagcgcttgcttggttgacactggtcaactttgtactgacaaaggaagggttccctgtgtgtggcaagaatgctctgagctgttcatggcagatattgattccatcagaatgttttcaaaataatatattcatttttattatacgaaaaacacatactacaggacatatatttatgaaagaagaatgtaaaatgaagaaaactgcaaaataggttacaacatagggaggtgccagttcttgagggttctggaatgtcttattaagacgttgatttttattgatttttgccctaaaggcatcaggcagccacagaaacactttaggtaaaggagcaatgtgttcagattactgttgccaaaatcaccccagatgctaggtagaaaatggattgcaatgtagcaagaataaaacagggagccctctgaaactcagaagatggtagcttagagtagagtagcatagagttggtagcttagagtagagtagcatagagtaagtagcttagagtagagtagagtcccttgcagagaaatataaatattcctggtttaactagagggtaaaaatacacagaatttggtgactgatgaattgtgttaaaagataattttcaaaacaggtaaaattatgactcttatacaaatgtagaatgaagatgtgttgaagtttctacttaactcattaattaaatgaaggaacaacgttgaatattataactagttcaaagggtaattcaaagaactcatacatttatatatcccgaatgatgaaatgaatattcaaaaggaggcaaatctagcttcgtggacagtggggggtggggtgggtgggattcagttgaacctctactagacaggacataatttgcatctttatagactagaataattttgcattgttttcacttacctacaacttacagagaagtagaatagctcccacagaatcaaaagcaggtaattctcaaaaggtacttgctacagaaagcccaattttccattgaagtgcagattattccctagaattgctgtgtgtgtgtgtgtgtgtgtgtgtgtgtatgtgtgtgtgtgtgagagagagaaagaaagagagagaggagagagaggaggggaagggagaggattacgtatagctcaaatcttgtatgagcaactgcaacctccgcctaatttacagaatgagtgtatatgtatataaactagaagagaaacagattaaaaagcaggggcaacctcctttatgtacttaataactgacaaatagcattttctatggtatacatattattttacaatatcatttctaatgatggaaacctctagtttacacatttgccatgattaattaaaccagtcctctgaaacatttagagtatttccagtttttctccagagagccctattcccatacctgtgcatatttccttaattatttcctcaaagggaagttcctggaagcagtatttctgggtcaaagtgtagatataattctgcctctagaaaggccgtgctaatttacttcaccaccaggaaagggttggcttagctaatttattccctgtggatgctttttaaggatttttaatcttctttatacatattttacttcatgattaactaacccatttttgctggtatttttctttacagtaaatttaaaatatatcttgatatccactgttcaattttctccaaattggcttttctttccttacaaatgaagggtatatatgaatcttaggcatagaatcatgttgtttactcattaaaaagattttttttccttcataaaatacatgattctgacccagctcattattttggtaagtggaattggtagcagcctgtatattatgactgggggaggccctagaaatcactttttgtagtcttcaagcaccaactgtgaaatcctgtcatgacacagtcattcataggatggaaaattctgactttcttggcctcagagatcatccaggccaatgcccttgtgactgctcaatgggttcattttaatcactccccaggtacagccaatttgtcaagacagaggaattgcagtagggaaatagtttaattcacccagagctggctgaacaggagaccggagcctctgtggacatttggaagctagggtttttcaaggatagtttgatgggcaagggaatgggtgctgctgattggttgtggatgcagtcacaggagtgtggaaaacagtcctgtgtactgagtccactcctgggtgggggccacaggatcagttgagtcaagagtcataggtctgggtggggctattggtggtcaacaatgcaaaagcctgagaagacaactcaaaaggccaatcttaggttctacagtactggtgttatctgcaggagtaattgaagaagcagcaaatcttgtgacttccagaatcatggctggtaattctttatgcctacatcttagcagaatagctcctctcatcctcctaacctggtggtctttcataagttttacaaaggccatttagttctgaagaaaagtgattatcatttaacctataaactaaatttctcccaacgttagcttggcccaagcccaagaatgactaagggcagttttgagattaaaggcaagatgagggctgattagatcaaatccctttcattgtcttaattttctcactgtcataatttttgcaaagatggtttcactcttatattgcagaaggagaaatttgcagacaatggcagataggatggaggggcattacctgtggggcaaactcctatctcctggttctccttggttaacatctccacccttgacttccagattatatcaacccacaccattttctgtggctattgaaaagcctgaaagtgacagaggagactgagactctaaggggatagtgtcagccaaattggagggttgggcactcatggagaagtgactggtcagccccagatagtggactgtccaggccagcagggagtcatttagcctgaacactagtttaccaccaccatggcagaggaagagcaaaaggctgagagttagagaagcaatgaaatccaagaagagttgagaagttgtatgagataacatctaattctaatgtagttagaaaaatacttagcttggcttcctgcacttctgtcaaagacactgactatgctatcactgaaggagagataatatggagttcttttcaaagcaaatacttcttgcagattgctaggatacatggagtcctggattagtgtcttaagaacccagtttcagaaaaactcccttcaaaactatcactgtgggtgaacacttagtgccagtgagtgaacttaaaatcacaaacgcaaatgtcacactgaaatagattatctataaagtagtcgtccagatgaaacagcatatggctacaactaagtgtctctttttagattatgataagcatgaaaataaacttcttacagatggatcgaccatcagcctgagtttatgcatccctaagagtccaactttgctgaaaaaattcctggagtagtggttaagagcttattttccagattcaggcaaacaaaagttagaatcctggcatatttctcctagcttttgaccttgagtaagatgctcaacctcactaaaaacaaaatttgctcatctgtgaaataggaataataatagaatctgccaaacaggaatgttgggatgactaattgaaataatgcatataaaaggctcagcattccacagtgcgcagaaaaagagttcagccaatgctaggcattaatattaacatcctgcttgagaaaaatatttgatttgctttggaaagtaagtgccaataggagtagcacatgagaactgaggctaattcagtcagcactgtgaggatatatatctttttttttattattatactttaagtactagggtacatgtgcacaacgtgcagatttgttacatatgtatacatgtgccatgttggtgtgctgcacccattaactcgtcatttacattaggtatatctcctaatgctatccctcccccctcccctgaccccacagcaggccccagtgtgtgatgttccccaccttgtgtccaagtgttctcattgatatatatctttagagtttggagagaatgctctgagaagagaaagtcaatgtgattacagaaagggaatgctggcaaaatggaaaacaattttcacctacttagttaaattgtaccttaacttcatagaataactatagaaacctaactgcagcccagtgcaagagatggggatgctaatggatctgcatgagaaagtgctcttcaggatggcatccaccttaattgtagaacagtgattccccaatggtggacagggagaccagacatttggtggagggggttgaaaaagcctcaagtcaacattttaatagagttttattggagtagaatcttggcttatggggagatgtggaatgtatagggattccacagaaggcataattacttccatttctccctggagagacttgtcaaacagatttctatgagatctgagcttaaagagttgagaaatactaccgtagaccagaggttggcaaactatggtccacaggccaaatctggcccactgcttggctttgtaaataaagttttattggaaggtatccacactcattcatttacatatattctgtggctgctttcatgctatatttgctgagttgagtagttgcaatagcgacctgggggctctcaaagattaaaacatttactctttggctcattacagaaagtttgccaactcctgtggtagattataaaggcctaaacagccccaggcagtgtactatttcctttcaacaggaattttgtgaccaaaatttgctattttcttcataacagtccttgaatcctttagaagtataattgttactctttaagacattgtgaaggcttactattatagtaaaattaggaattctaagcaaattcttaattgtttcagctgcttcttagaactggaaattttggtgaacttaccagaatattctttgctaggaaaagaagccaataaaaaatgttagagattttaaaccagggctaagcaattattaagggtatcaaattttaaaggaagaaaagacaaaggaaaaacagaagaaattattcatggattggtgacaatttaaggctgaaaattaggtataataaaatcaccaccaccaacaacaaagtacatgctgaatgagattttcatgtaactactaaatctgctgtctttccacccagcttattagaactgtgtgatgtgcttatctgcttaagctttgacagtggcctgtggggattgacttgttcaaatcaggggctttgaagatattcacaaagacacatatttttcaaatatacaatttcagatcagcatgcattcagctgtggcagtggtcctcattttgccccccagaggatgtttgacaatgtctagagacaattttggttttcagtggaggtgggagaatctgctactggcatttagcaggtggaggccagaggtgctactaaacatcctaccatgcacaggataaccccccactagaaagaattttctggcccaaaatgtcaactgtggtaaaattgagaaacatgatgtataggaggtgagctatttcaacatggaagttatactatcattgaattctcatacagtgtatttacattaggattacctatcttttatttatttatttatttatttatttatttattgacactctgtcatgaggctggagtacagtggcacaatcttgactcactgcagcctccacttccctgggctcagatgattgtcctacctccgcttcccaagcagctgggactacaggcatgcactaccacacctaatttttgtatttttttttttatagagataggatttcaccatgttgcccaggctggtcttgaactcctggactcaagcaactcacccacctgggcctcccaatgtgctggaattacaggcatgagccactgcacccagccaggattaactactatttatagccagtgaaactattatagttcgaataaaagatttctcttttaaataaaaatgttagtttaaaaagtcaatttaaagaaaaatgttaactaaacaatactatagatgacaagtagatttgttacataaaatataaagacagttgaatgaattaatttttaaaaactgccctaaactcttaagcgaatgggattattttcaaactgtcattctttgaaacaatgccagtgttaacccaagtagttcccacatgctatcatatttagtaagtcttcctgttttatttttgctaaacaatactgagatatttaggataagcttttagtcctctggatattggtggctcttctcgtgttcttaggacagtgtgctggcagttgaaattgggagtttagtttaacggattacatttctccttcactttctctctcaaactcaagatggcagctcatgccgctctgtttcaaaggccaccatgtgccaccttttgcaagccacccatctcagatgcccgcatcgggaagcacttttagaagtctttgtcggcagccccaagagggagacacagcgtcgtctgaaagtactttataaatatttatgggattgacttgcaaattacagataaaatacctgaaaacatggtaaagagcaaatttgtctggtcccaactgaagaggttttgactcagtagacctcggctagtctctaggaatctgcatatttaacaattatcctgagtgatgctggaccaaacagtgagaatcactgaggtatgatatatgacaataaaggaaagatcttgattgcacacattgctctcaactttggtactgtctgcttttgtaccatgtgtttgtatgttatagtttgacatcacagactgcctgttcataaaccaaatttgagttttccttatcttctaatgaaccaatgtattttcatttgtccttactacttaataaatcaaaagaaaaataagaaatgagaaaaaagtcccctagacttaataccgatgggtcaaaaatggaaatcattaggcatgctgaaattgaagaacctttaacttgcattcagcagcttttggacataagccaggcaaaaactgtgaagaaaatgaacacattttaaaaaatgttagaaatgctgtcattgaagtttgggtctgaaaactgagggatagttaggaaatgtaaaatatctttcttggtgaagatattttttcttgcagtgggcatgatttttgcatacctttagcatgttcagtttctgaacacattcttggggcatgtacaaaagcaagaggttgccaatagtagaatgacagcaagaaacttatttttcacatcctttatttgaagaagcagagtgacgttcattcccactgtaattacagttctcaggtggtggaaatatttcaagggagccaatcgtctcatctgttattcagacataagcaagatgttgataggactctccttgacaaccatagtactgagaatgttcattttcatggctgaatctccacctgaaaaggattttgtgcttgaactcttaccaatggctcttgtaacttgccttcttaaagttactcactctggtcgttaattagactgtgattggatggcaaaaaaaaaaaaaaaaaggactggagaagaatgtagatgacatatgttagattaggctgtaattttaagatcttgctttaatatctgtacatcttactgtctttttaaaaatttaattaaacattctatttcaagataattgtaaattcacattcaattgtaagaaatattacaaaaagatcctataccctctactcagtttctctggtagtaaagtcttccaaaactacagtatgatatcgtaacaaagatattgacattgatattgatgtagtcaagctacagaacagttccattgccacaaggatccctgatgttaacctgttacagccaaatccacatccctgggctccctctctcctccaccaccacattcctaacttcagaccatcgttaatctgttttccgtttctataattttgtgacatcaagaatgctatacaaatgcaatcatgtagtatgtaacattttagatttggctgtttttttcactcagtataattcttacagagatttatccaagttgttgcagatattaatagtcaatttctttttattgctagtagtattccattgtatggaggatgtaccacagttcgtttaatcattcacccacagaaggatttccacattatgaggcttccaggtttcggctattttgaataaagctataaatattcatatacagattttttttttatgtggggataaaagttttcatttctgtgtcataaattcctaagaatgaaacttctggttgtatgatgctggtttcattttttaagaaactaccactgtttttcagagtggctgtaccatgttgcattcccaccaactatgtatgagtcatccaatttttccacatccttgtctgcatttggtggtggtggtattattattatttcagccaatctgataggtgtgtattggtagccattgtggttttaatttgcccttccctcagaggcagtgatattgaacatgttttcatgtgcttcttgaacatctgcgcaccctctccggtgagatgtctgttcatgacttttgcccattttgtcattagattatttgtttgttttactgttgtgatttgagggttctttgcctattctagataccagttctttgtcagatatgtggtttacacatcttttcttccagtctctcacttgtcttttcatcctcttcacagagtttttcacataacggaagttttcattttgatgaggtccagtttttcaaattttccctctgtggattatgcctttgataacaggtctaagaactctctccagactgtgatctcatgcattttctttttatcgttttatttgatatttaagttttatcattttatttaatatttaggtctattttaagctatttttatataaggtgagtgttttaatgtttaagtcgacgatttttccacccccctccatggatgtccaattgcctcagtactgtacactgaaaagtttgcttttcttccactgaattgcttttccacctttgtatctgtgtttttatattgcttgatggatttaataactgtgcaggatgaaaaccaatagaattgactaattatactaatacctctgggtatttaaaaaataacagaatcctctttcatttaatttacaggttttttgttttgttttgtttttttggtagtctctctctgctgcccaggctggagttcagtgacatgttctcggcttactgcagcctctacctcctgggttgaagcaattcatgtgcctcagcctccagagtagctgggactacaggcatgtgccaccactcccagctaatttttatatttttagtagagatggggttttgtcatattggccagactggtctcaaactcctggcctcaaatgattcatccatcttggcctcccaaagtgctgggattacaggcatgagccaccttgcccagccatacagtattaacttttattaaacaaaacaaaaactaacaaacaaaacccaaaatctattctcacgatccagagaaaacgttgttaacatttttttttgtctttttccaatgcatttttagtatagtggagatcatgacctaaatgaaaatttatattctgcttcacccctccccacaataacatattatgaacacttttctatgtccttggaaattccttctgaaacttgtttcaaatgaaccaactatgttatcctgcagacagataatatatgtattatagatgtagtataatttactatataaatattatgtacactatctatattactattttttataaaataattacctatgttatcttacagatgtataacatttattatagatatattctatatgtatcgtaatatgtactacatgtttactatatgtgtaccatttactttatatagctactaatgttgctctatagataagtagatatattacattatatattgtagaagtattataatttactttgtcactccttattgttgaaatttgagtaatccctgacttttttattgtaaataatgctgctaacattttattgtacattcggtgggatcagacacatatcttagcttctttatttagaactaaacttcggagtagagtggatttcgttttttcaccctgaacaaagcagttaatttatgttcaagtttctgagacagaagagaaaaatggaatatataaacattgcagacaagtagtagttaacttgaattcctcacccatctgccaggtactgatagaattataagaggtttttaaattgactatgttttgaaggaccaaatattttatgtagactttgttttgtttcttcttattagctcagaggttcttaaactttgtagtacataaaatttatttataggtcaaatatacaaaaccacatatatatggtaattggaggtaatttaaggatcgaggataatcatgactgaagagcagccacccgtctgcacttgaatatggaattcattttgttttgggttttttcctaaggatagatttctattctttttctttttgagacggagtctcgctctgtcgcccaggctggagtgcagtggcgccatctcggctcactgcaagctccgcctcccgggttcacgccattctcctgcctcagcctcccaagtagctgggacggcaggtgcccgccaccatgcccggctaactttttgtatgtttagtacagacggggtttcaccatgttagccaggatggtctcgatctcctgaccttgtgatccgccggcctcggcctcccaaagtgctgggattacaggcgtgagccaccgcgcccggcctgatttctattctttttaggttatttattgtcaagcgacctttaaagatgaccagtcgagtataatagtgccactcagacatttgccatcagtaactattattattaaattatactcatttgctgggcgcggtggctcacgtctgtaagcccagcactttgggaggccgaggcgggtggatcatgaggtgaggagtttgagtccagcctgaccaacatggtgaaacccggtctctactaaaaaaatacaaaaattagctgggcctagttgtgcttgcctgtaattccagctactcaggagtctgaggcaggagaatcgcttgaacccaggaggcggaggttgcagtgagcggagatcgcaccacctcactccagcctgggtgacagagcaagactctgtctcaaaaaaaaaaaaaaaaaaaattatacttagtaatttttaggtttaaaaatgtctcattttattttgcttttggagaatattgtttttcatatgctcattagctctttgcattttctctctctggcattattaatattttaatgtgctagtgtaccttttactagttattttcttcaggatagttttggttgctagaatcagacccccattcaagctagcttaattaaaagttgcagtgatgttgatggtgatgggttcctggggatatagatgatttccaagaaacccagaggaaaggctagatctcagtattaggaattgaaagattgtgaagaactaaaatgtctcttttacctagagtagaaatgatctagttccctgtagcaggttccacagcttaactctcctgcaagtgattcaacatggccaacaacttctgtttaaacctaccagcattgacctttcaatttggtctgcacctctggtagtaatcttcaagtctctgggttgaatatcctaagcaagaatctggttggtgttaatcagccaattattagctagttagtttagtgtctggtccaactcttcaccatccattatgaggaatatcacgacaaccatgagctgccagattctaggatgggcaatgagatcttcagcatagaccaagcccatggttttcagatttaattgcacttgaaattctagcatgttccttgaatgcctattttatttgtacatttgggatttttatctctgggacttttttctgaaatatacctagtgatattgctatcaaagcatgaagaaatttatcttcaaatacttattttcttttgattccagtaattgtctgaatgacacataatatgcccgttgtggaaacaattttgatttttaaaactttattttcacaaagcaacatcacatttctggcttgcaaatatttcacaggtgaaaacatcaaaaagaaaacatttaaatgcaaatgtcagtcaggggagatgctgagctcagtctttgtatttccttccagatttatcagcgatgctggttagtattcaagaaagcttcaagcaaaggtccaaaaagactggagaaattttctgatgaacgtgctgcatatttcaggtgttatcataaggtaagactcaattgctgtagctttccagtaatctatttacagggaggcaactggaattactgactgaaaacttgcctgaattatttaacaaaggtacaagcaatatcttttccaaggacaaaacacccctaaaataacatctgcttgctaattgtttcaagtaattgactaatgtaaagtcacttttctggtttcctgctatttgctgtagctgttcttgctgttttccagtctctgctatgggacttatcatgttgttgtactccctacactgaagccccgagaggatgaggactggatctcattgtgtctcagacactgcctgatgcagaaagacactcattcaatgcttggggaatgtggggagagaagggaggggaagaagcagaaaacaggtaacagtggacgaagaggaagttctaccgatttattgttttctttaagtttgatgactaaattttcttagtagtagtgagattttctcaataaaaatagtcattgtgtgttacaactcattaaggtaagtacaagatttacttaccacgtggattcacaaattagctaaatatttccctctacatggcagtatatttccgtggtccttgttaacacgcagcctatgtattttcttttttcatgaaaacgtgtgaaagcacatggttaacactcctccgaggctctggttattttcatatggagaaaatactactcttttgtctatgaaggaactatgcttatttttatgatagaacattttaattttggctttccatcttgaagattctttaagcctcatttggtgagaatttactggggccaggcttctttgccatttaaaattttatgcgaaaccagttgatctattagaacagaaacttggctaggtgggggaagtgaacagcttttccttttgtgcaaattctccaaaagtagtgacttttcgacaccttataaagggtctatgatgacactttggtttatatgatgatgaaaacaatggggaagctgcatttcttctcaaattagagaaataaggactacgttatactttataggcacacctgtatgtacataagggaagaataagcacaaaacaagcttttgagacaggtagagaagggagtcaagggtggcgtcttccatgcatttcatttccctgtcaccccatgaagcagttccacattccaaggcttctcccactcccagcctttcttctctccaatggagaacccacttatacctttttgagtccagatttcctctatcatttatctgtcatatgccaaatatgaaatgacactgttcaaatatatatattttttgttctcagggaggagttgttgaattgaaaatgtattatttaggcacagtgatccatgaagccagtgatagcataactctgaactctgcaaataatcttgagccaaactctccacttttataacactctaaactatttgtatccagtcattttgaaccagatgtattatggcccagttatccctcatgtatccagtattttcccttataacaagatggcgagcaatgctataaggatgacttgctttatttttgctagaacagccttttcttaaaagagaatcaaaatacccaggaagatgtttggcttatcatctagacacagacagagctttaggtggccagaaagtatagttacacatcaggtcttctcttgagaaccttagccggtctgtaactttgcaattcaccctgaggctctgtactgtctggtcattgtgtgtggccttttggtccttttttgtcttggtagagttccaaatatgtctggttcttcacaatccaaacatctaattcttcacaattccatatgccaacctttctgaatgtagaaaaaataagaaataggctatgttacagatagacctatacatacctaagagaagaaagaagataaatgaggaatacattataggaactcctcaaatcccatccatcggcaaatggtgttggctgtatgctcaaaatgtatggagactctgaacacagctcacagtctctactgctactactggggtcctaggcagtgggctgccaaattcttgggcttctagagtctgttcgaaacacttatatcacatcacgatattctttgctgcaacaccctcagccaaggtctgataatggtctatgccagtggtccccaacctttttggcaccgggacaggtatcagggaagacaatttttccacagacggggttgggggcaggattggtttcgggatgaaactgttccacttcaaatgattaggcattagattctcataaggagcaggcaacctagatccctagcatgcacagttcacaatagattttacacttctatgagaatcaggaggtggagctcaggcaggaatgcttgctcaccttctgcggtgtagccgggttcctaataggctatagaccagtactggtccagtacccatctgctgcccagggatgagggtccctggtcaatgcgatcacgcgatttgatttcttgctgcccttttaacctcatctctgagtttccttaatcccaccttcctcttctccaggtgccctgggctcctctctttccttggaagatgccaagcacctcctgccctttatacctgctcttcccttttcctggaatgctctcccccaggtacccacagagctcgctcccttactttgttcagtgcgttgctcaaattgctcctctaagagaggccatttcttgactcccttgttggaaatagaacccacctactcactgccttccacatccctcttattgctcttctcaggaggcaccagaacataacacacttgcttggttgtttcctattgtcttcccctcttccccgcataaaatacggtctacaaagacagggattttttggggatgggagacatgattcactattagttaccagaatctaacacatagtgaacacttttaaaagtattggctgaaaagcaagaaatgttatcagtagaggaaatggaatacatacagatgtctatgtgtcatacttttatttagtttaccagaagaaatctgtacttgaggcatctgaaaccagaaaaagaaactttgatttggagaaaatagggtgggcagtgatggaagcagaaaaagccaggatttggatgttttaggaggacagaaaaatataaaaccaaagtggatgaaaaagctcttgcttgaatgtgaaatgaataaagggaagttgaggacaaacttgctctatttcagacttctacctgctggctttggaatttaatatgtaaatctttggggaaattggtaagccacattctctttcacctataataatcattaaccaaagttcaaagcattagaatggaagaattatctacatttagcctccaagcccttgatgaattcctgtagctgattcatcctctactcttttagatctgatacatttagtattaatctctcggggcacataaaaagctggagtaattctgagatatgcatttttcatctaaatgctgtgtaatttatgaatcttgataataaaatactggggttataagtagcacaccgtgaccaaattttagagtttattctaacataaataaagccgtttccaaaagaaatgaggaaatgtacatcatgctatttgatcaatacggaggtggtgtggtggatgcagacatatccctcccataggaaatcttagcctttataagagcacagtacttctcccattttatttttaaagatattattaagaaaaaaatgccagttttgcatatctgactctttttagaagtttcaacacaagaaaaagattgtagaattttaaaatttggtaccccctcactgaaaatgtagctcgaagtacactcctgcaaaaattggaaaataaacatatgaataatgcacatatagaacaatttattttttatttcttacttcctccacgaagcacccctcaagcacccatagctgtcagagatggctgcaaatttgattaactgtaattcccacaatagtaagactccagtgactttaaatatagtttctgaccttgttaaacactagttccatgttttccttcaggaaataatgttgcttatactaattagaaggggatgaaagtttctgtgcatagttttactttttcaagatgagtaacacttgagaggaaatagagtggaaggaagaccattgaccgcttttgagaccaaggcaaatggtatggtgagaagtatgccggtcctggatttaggtagcctgagttctaatcccagctttgccaccgtatatgtctgacaagtcatcctctttctgtgtaaaggtggcctccaaggcaagtcacacatttgcttcctcatcatcacatgtggctgagtctgcagggattcggttcaccttggaccagaaggacaagtccagcaaatcctgtgtttaatgtttcccaaaatgtgaacgaaagagtgtgtcaaaagagcctttcatgattaaatgttgtgtggtcaaagaaattggcaactgcaacgtttatggccccatctttgagattcataacccactgcagcccctcatgggctctgaaaagtcctacagttaagaaattggagggactttgagtcagcatttccaaaacagctgggccatggaactatttgttttaatcgtgtgttccatggaacaaataaatttaattctagggaacacagtctgggatttgctgctttcatgtgttaacttattgttgtttcaacagtaaacaactagggatgatcgtttctactttatctaaatcagggttaatgtgtgtattaaatgaacgtgaatgtatttgaaaagggaacaactctctaactgtagagattaattgccattattatttttattctcccaaacacctttggtcttatttgttctgtcattctaccctttatagtgactaggtcatttgtatctcctaagctcaatgtcagaccttgttcttcgtttctgcaaaaataggattctagcttccgcacaatgagctaatgtcctaaaatttatttctctggaatttcatccaacttatctgtgtgtgtgtgtgataaccttttctgtactaatgattcattctttttttacacagtttcttcctcatctaaaacatttcctcttccgatacagctgtctataatatgtcttttcaaaatcataaaatgtcacagccccctctttcaatactcagatatttactttggagtcatcccctcctcatgtaagaaactacccaccatgccatattctagaagtttcctaagcttatgccaaagaggacatgactcttcacatctccataaattaaatgatggattattactctgatgtttttcccaggtgataaataattccatatccacatttctaaggcttaggtaaattagataaaagaggttgactgtagtacaaaacaccctatttttccaatttaagtacttttttctagtcaaggaagtatgagtcagtaccagagtgccaaagactcctgaaacacgttcaaaactgactgaactctttcctacccaagcttggtttctttctttccttttttcagatggagttttgctcttgttgcccaggctggagcgcaatggcacgatctcggctcactgcaacctctgtctcctgggtccaagtgattcttctgcttcagcctcccaagtagctgggatcacaggcatccaccaccatgcccagctaattttttgtatttttagtagagacggggtttcaccaggttggccaggctggtctcgaactcctgacctcaagtgatccacccaccttggcctcccaaagtgctgggattacaggtgtgagccaccatgcccggcctgagcttggtttctttatgggcttctgtggctcattgtacagcatcaggatccattctgttattcaaggcagaagccagggagttgtctttgacttactctcttccatattccctctcaaatcaatccatcaccaggtttgcatgcagcactcccgctgtatagaccccttttctttcgtggtccatgtggcaaacatttatcaatccctcaaagtctctgctctgtcttcacctccccaagagtcttctcgactttccctgaggtggttcatctgctgggccccctctgcctggatgcactggtcacaatgaaagcagggctttattttcatggtggtggcaggttctgtccatttggggctgatcccttcttctttggtaatggatgtctgatttctagttggagacaaggcaacccatagtaaagacccctgtgcagagagatatgttcctgcaactgattcctggcctcaggggaataagcacagaagacacatacccttcttcgtctcttgttctttcctactgattcgaaaatgggcgtcagccatcttggcccatgatactggaaagctcatggattgagggtagcccagcaacaggtgaagcctggaactgggtgctcagggctggtctgttctccctcacactgtagaaccccagggcaacccaagactacttacctctggatttgttttatatgagaggaataaacttctttcttgtttaagcctttatttatttatttttaagacagagttttgctcttgttgcccaggctggagtgcaatggtgcgatctcggctcaccgcaacctccacctcccaggttcaagcgattctcctgcctcagccttcccaagtagctgggattataggcatgcgccaccaagtccggctaattttgtatttttagtagagatgggggtttctccttgtgggtcagtctggtctcgaactcccgacctcaggtgatccgcccacctcggccttccaaagtgctgggattacaggcgcgagccactgcgcctggccacgtttaagcctttataatgctggattttctcttgtgtgcaccagagtcctagctattagagatgtagtaaaatttcctcatcatccaatgcactctgggtagggaattctgttattcacagccaggagtatcctgacatggtcactgtccgttggatttgaatttcttgaagatagaaaccatgctttattcatctttgtatctatctttccaacatagtgtctcatgcaaagtaggtactttggattctacaggcccttacggttcccaggaaatgattcttggcctacttatactagtattgcatagtagaaatgttagggaaccctggtgtattgagaattaaaagggccatgtgactcacatgccaaattctctgtcatctgagcacatgcatggttttgtcttatggagaagaccttctaataacagagataatgacatcatattttaaattttatttattattattattatttgagacagtgtcttgctttgccatccaggctagagtgcagtggtgctatcttggctcattgcaacctctgcctcctgggcttaagcagtcctcccacctcagcctcctgagttgctggaactacaggcgtgcgccaccatgcccagctgattttttattatttgtagagacagggtcttgctacattgtccatgctggtctcgaactcgtgggctcaagtgattctccctccttggcctcccaaagtgctgggattacaggcacgagccactgtgccaggcctcatttgtacgcatatttacattaaaaaaatcaatctaaaacatacagaaggttaaaaaaaaaatcaaatggtattgaagcgcttatcatgaaaagtagcagtgcctactttattcccacccttctgttgtgggttgaattgtgacctcccaaaaatatatgcctaaggtgtaactgctggtacctgtggatgtgactttatttggaactaggatctttgtaatgtattcaagttgctgtgggattatcggattagagtggaccccagtcccatagctggtacccttataagaagagacacagacccacagggagaaagccatgtgaagacaggcagacactggagtgatacaattaaaagccaaaggtgtcaaggactgcggcagccaccagaccgtaggatagatgcatggaacagactctccctcacagcctccagtaggaaccaaccctgccagcaccttgattttgggctctggcctccagaactgtgacagcatacatttctgttgtgcaagacacctagtactttgttactgcaaccctactctaggaaacgaattcacctcccgaggcttaatcaccattgtcattccctggtgttcattttcctggtggttgcctctgtaactctcaatgatgtgtttataactttgtttcttgttttattaacttccaacattaccaacagattcctcccctttagaaagttaatggtttggctcatttatgtaatctcatcaactctttcttcttccttacaaattgtgacaattacattactttcaataaatattctactgtatgtggaacattcaataacatggttaaacctctgtgcccttccccataaatgttctgatactgagactgattcttatatcagtctcagttgttaacgatcttattgcctgtcccctttgcttttctcttctctatttgtcaggttttttttttttttttttttttactttcatgttattcaataccagattcttgtcttacagcaatgtgggctcgctcttgtcacacgttccattgtttcgagagaaactggaagcaaagatcttttagttgaacactttcaatatttaactgtaattttaaaatataagaaagtataaattgaatatctctccgggtgattggcctgaaagctgcctttaaaattttttttaaatctcttatttaccccttgaactaatgctagaaagagaaagcaatggtattcccaggaggcaacatgtggcactatacttagtaggtctactattttaatatgtgtaaattacaaataaaactatcatcatactttattgcgttggacctagactcctattttctttcagttatttatagtttatatagatacattcattgtgatgaaaacattacaaatacttcagctataataagacttctatggctgggcacggtggctcacgcctgtaatcccagcactttgggaggctgaggtgagcggatcatgaggtcaggagatcaagacaatcctggctaacacggtgaaaccccgtctctactaaaaaaaatacaaaaaacaaaattagctgggcatggtggtgggtgcctgtggtcccagctactcgggaggctgaggcaggagaatggcatgaacctgggacgcggagcttgcagtgagccaagattgcaccactgcattccagcctcggcgacaaagcaagactccgtcaaaaaaaagatttttattagagatacacatatgcttcccaaaatattattttggtcaacaccattgaaaccatcaaggacaaatttgtgtctatgcctcctctgtaagagtaccctaattgtgattggaaagctgaatgttttatatgccagaatgacaggtttcaaagaaaacacaaagaacaaaatcagagagagagaaaaaaaatacatataccatgtagtatgaccatggttgaaacaaggtcaaaggtgatgtcaatcccatgttgtaacatctacgggggcaggagtcacaaacgttggatcagatatcacctgtgagttgcaagtacaaggtagtttcaaagctgtgcctctgcaatatttcttttcttctttttgaggattcccgtcacccttagaattatatcaaagctcattgccaataccctggtctcctaagccctgtatgattctgctccagcacatttctccgacttgccatgccacttgtcactttgctacaatgacctcccttcatttgtcctgtctcaaagcctttgcagtttctgttcctttgttctattgagctctcccccattttttttctcttccttcagggattagctcaatttcactgcctgaaaagggccttatttgaatactccatgcttctcagaatcacatttctttagtactgtactctcactttatgtgtgggggatacattccaagacccccagtggatggctgcaactgtgtatacctctcaaccctatatattctatgttttttcctatccatacatacctatgataaagtttaattcataaattaggcacaataagagattgacaataactaataataaaatagaacaattataacaatatactgtaataaaagttatatgaatgtggcctctctctctcaaaatatctattgtactatactcacctattttcagaccacagctgactgtgggtaacctgaagcctctgaaacagaaactatggacaagaaaaactaccatatattaagtagatagcctttctcactgttgaaattatgttggccaggtgcagtggctcacgcctgtgatctcagtattttgggaggctgaggtgggaggatcacttgagcccaggagtttgagagcagcctgagcagcatagtctcaacatagtctctctaacattgtctcttaagaaaacataatctacatgtatatttgtttactgctagtataccttaagctccaagaaacttattgtgtgcatgttgtcacctgtaggttcttgtatccatcaccacattaagatactgaacatggtcgggcgcagtggctcaggcctgtaatcccggcactttgggaggccgaggcaggcggatcacgaggtcaggagatcatcctggccaacagggtgaaaccatgtctctactaaaaaatacaaaaaaattagccgggcgtggtggtgtgtgcctgtagtcccagctactcagaaggctgaggcaggagaatcacttgaacccgggaggcagaggctgcagtgagtggagatcacgtcactgcactccagcctggtgacagagcgagattccgtctcaaaaaaaaaaaaaaaaccctgaacatttccatcagcaagaggactttttgtgttgccctttcataatcacatcctccagtcctcccaccccaccaccccagcaggcactaatttgtttcccatttctacagttttttttttcttttcaagaatgtttaatcgtttgggattggccttcttcacgcaacataactcccttgggacttatccaagttgctgtgcatagcaatagtccattcccttttactgctaagtagtaatccatagtatacattcccagagtttgcatacattcatccactgacgaacatctgggtcgtttttagtttctcatcattacaaataaaattggtatgaatattcaagttcatgttgaatgaacataagttgtcccccctcctctccatttctgggataaattctgaagaaagtaattgctgggtcatatggtagttgcacgtttagttttgtaaaaagctgtccaactgtgttccagagggactctaccattttacagtcccatgagcagtatatgagtaatccagtttctctgcattctcaccagcatttggcatttggtggtgtcactatttttattttagtcattcttttctttttgagacaggatcttgctctgtcacccaggctggagtgcagtggtatgattagggttcactgcggccttgaaggcctggcctcaagagatcctctcacttcagcctaccaagtagctaggactacaggcatgcaccaccatgcttggctaattttttaatgctttgtagagatgaggtctcactgtgttgcccaggctggacttgaactcctggcctcaagggatcctccctcctcagcctcccgaagcactgggatttattttagtcattctaatagtgacatttcactgtggttttaatttgcattccctggtggctaatgatgttgaacatgcttctgtatatcttctatgaaatgtctctttatgtatttgacctattttctattttttttttactattgagtattgggagtgtgtgcgtttgtgtgtgtgcgtgtatgtgtgtatatatatgtgtcagattgtgctggaaaatatgttctcccagtgcatagatttttctttcaccctcttaacaggatcttttccagaagaaaagtattaattttgatgagacccaatttctgaatttttacctttattgttcatgcttttggtgtaaagtctaagaactccttgcctgaagttcaatcctaaagattttcttgtttttttcttaagaaaaaaggtatagttttaagttttacatttaaatatgattcattttgagtttaatttttgtattaggagtgaaatgtggattgaatttaattcttttccctgtgattgtccaattattccactatcatttgttgaaaaaaattattctttccttattgaattgatttttttacctttgtcaaaaattatttgggcatatttatgtgagtctgttcctagattctctattcttttccattgatctgtatatctgtttctctgccaatatcatactctcttgattactgtagctatatagtaatctttaatattgggtagagtgattcatttcactttattctctttttcaaagttattttagctaatctagtggctgtgcctttccataaaacttaaaaataagcctgtctatatctacagaaaatccttgttgggattttgagagttatgttaagcctatagagcaaattgtgggagaaccgatatcttttctatgttaagtccattcatgaacatggtatgattctccatttgttagaggctttttaaaatttatttcatcagcattttctaatgttcagccttcaaatcctatgtgttttattacatttatacctgattatttcatttaatttgtattaaattttaaggtttttaaaattgagtatctaatttgtataagccagtcatttttggcctatgatatgacaaaacaatcatctagttttctctcctaccccacaattatttaactaatcttagaaatgattaattgtctttgcattttgggaagagcatcaggtttttaacagtttataaaagtttaatttgtttagtctgtcattggactatttgttttttgttagcttagttatattctgaagaaacacacaatacacataatgacataagaaaaacaagacaaaaccaaactttacttatgaagtgaattgattgtagatgtttttcctccattcatgtgtttcttacatgaatttcttaatagcgtatacctctaagatacaatctatccagtttcacatttgtatgcatatgtgcataaacacttaaacataatccaagtacacatataatctctttgtacatgatgccaaaaggaaagggtgggttttctcaagttggtgaaaagtttgtcagatagtttttccgtttgggagaaatcacaggctattattagccaaggcagtcaatgcccaaaaaattctattgacaaaagatggaaatctactaatcggtttacatttttttgcagatttattttttctctttacacttcttattttttaagttattaaaaaaagcatgttttttgtaacaaatataaatgtttctggctgggcgcagtggctcacgcctgtaatcccagcacttttggaggctgaggctggtggatcacgaggtaaggagatcgagaccatcctggctaacatgatgaaaccccgtctctgctaaaaatacaaaaaattagccgggtgtggtggcgggcgcctgtagtcccagctactcgggaggctgaggcaggagaatggcccgtgaacccgggaggcggagcttacagtgagccgagttcacgccactgcactccagcctgggcgacagagcaagactctatctcaaaataaataaataaataaataaacgtttctgaaatgtatggactaaaacgcaaaaaaaaaaaaaaaaaaaaaattctgatgttggaccctagtccctgccgtcagaaaaaaatgctaatagtttaatgtgcatttttcaaactctttactctgtctgcacacacagaaacatattctcacacacatataaattagttttagaggtaaaatggagtaattcattacatattatacatattatatttaagcagttcataaattcaggcttccgtaggacacatttggtgagcctgtggttcttgcgtaaattatagtggcagttcctttcatattcaaaatattgtggttaatgagataaattatatgatcacacgaattgccctagtccccttttcctcatgttttgactataattctaagtcagtaattaatggctctacctccttaatttaacagctctagcgtactgtttaatatcaatacaccataatctgtttaagcatacccaaattggtggacaaaaatgtttccagtttttgctaataccaattctattacagtaaagaatgtgtgcatctatttttatgtgctcagactaatgtttgtggacgaaacagtcttagaagtgaggtatcaggtaatagcctgcacctttaagtttttttctggttactgccaggatgtctctaagaaggttatataaaatcatacacccactgacagcttatgaaagtccccctcatgtcagattccattctctctgtaaatttcagatgcaaacttctcaacttaagcatttttaaaagaatgcacggtgcacaaatggattattttagttatttcacatggacaaataaagagccactcttcaaggagacgtccacatttataactcagacaggcgctagtccctattttaagtgacctagggcatgtagatatttttggaaggaatgaaaccatgtatatggggactggaatataactgtctagactggttctttcttaagaaaattttaataaaagtgtttgcttaaactgctatgttcaagggtcctgggaggagcttggatgaaatgtcttgtggataaaatttttgatgaaaactgagcatgtttctctttgctcgcttctccctgctcactggcactgtatatttaagccattggtatttttttagaaaagataatatgaaaaggttaaaagttttgtaacacattatacaacatcttttggaaatttctaatagaaatgcttattagagtattttagagtactctgccatttaaacataatcgtataaaaataattgttataatttaattgggttatttactaacacttcagaaacattgtggactcagaaatggatggttttcatgttagttttatttttgaagacaacgtacaaaagttaaaggggcttgtgcctctttattttcggtaggataatggtaggataattaaattgttttttaagaatgaaacaatttgaagcttctgcagagctttgcaatttgcatatacaaagtgaattgctcacttaattcattcagtcccacaagggaaaaaataattaggatacaacctacaaagcaaggcggaaaattaccttttatgtagcagtcttgtttttacttggtaaacataaataaatcatcatctgtaaattaccatcagcaaaagaaagggaaaaattggaaatctgatccttttttttttaaatggcttttgactttgcagcatgtcagaaacatagttgatatccccacaaaatgcagattaattgcataattctgacaggaatatgccagttcctgaagggaatgtgcctttaaaaatcccattgtagtaatctttttgaaacagcagaagaaatttcaacagtttcccgtctagttacaaaataatccatttggaaaattgaattgtgtaatttgcaatggttttccaagttgttaatgcaaaactatatcggtagcaaattaaacatttaaagtatgaccactttgttaattgttggctgttaaacatttatttcaatgaatactatcatttatgatgaataagacatctggagtatggctttaaacagaaaaattaatttggcagtccatttttggaaattcttaattggatggcataaagatttatctgtaatttaggagagtgttgagtatttctttcttttgttggaatcacagtactttgtgtatttgatactcagaaagctagaaaccaagaactgcatagtaattaactatttcttaaatatctccctgcttttttattcctctttattcttacctaggtgaaagtcctaattgctttttgctgttttgtctgcctcgctctcaggacctcctctcctgccctcaggtcccattcccatccttctcatggttaaaggtcaacatgtgtggccaagccagctggacaaggctcaaatccaggaggtgccattctgagagattccatttgagtggtgcttcttatagttgtatgaggcagctgccttgttcattgtccacttttactatatataacatcagcactgttgacattttggttgtgagaggctgtcctgtgcgttgtaggacctttggcagcatccttggccttgaccaaccagatgccagtacatcttctcaattctgacagccaaaaatatcttcagacattgccaagtatctctggggaaggggggtgggcaaaatcttccccagactgaggaccactggcctgtggaatcatctttctagagcataaatatgactgttccatttgcctgcttaagccttttaatttgcactcttcagatcttatgattcaccctaaactcctgagtgcagcgtaccagcccctttaggatctagctctggtccgtctgctccagcctcatgctcatcagtttcctgttgccaacttcctcccatcactcttccctacgttttcatcataccaaactctgttgtcttatgattgcacacgtgtagtttcttttgcctggaagctcatctttgttttctttgcctcataaacccgtgctcatccttcgagacccatgttaggactaacgaggcctaactcagaaatgatggcctctctgacctttttctctatattcatttggtggtttagtaaagagttgttcaattttctgtgtttgaattactgtctcagttattcaccgtctgtatgaacaaattaacctctttatgttgcaacattcttttttttttttttgagacggagtctcgctctgttgcccaggctggagtgcagtggcgcgatcttggctcactgcaagctctgcctcccaggttcatgccattctcctgcctcagcctcccgtgtagctgggactacaggtactcgccaccacgcccggctaattttttgtatttctttagtagagacagggtttcaccatgttagccaggatggtctcgatctcctgacctcgtgatcagcccacctcggcctctcaaagtgctgggattacaggcgtgagccaccgcatccggccgcaacattcttatatgtacaatgggaatacaatagtgccagccagttagattggaaaaaaaattaaatgacatgattgatatgaggtgttcagaacgtaatacctagcatataattaagaaaaaaattaatgtcagccactgccgctattattgttattatgctatcataatatcttttttttaaggttctacaaatggcccacaagcaacgcaggcagcccccttttttttgtaggtcttgggacctttgggaaccatatagatcagattattagatctttccctttgtatgcttctgttgcacttgtgcagacttggtctaaataatcattctctggagttcgcctgcctctgccactagttgggaatggtccaaccatggatgtgttaatgacatcactgtgcctctcagccttcttgcttttacagtgtggatgatgccaatattcacctctggaagtagaactttaacaagcacctactgagggtctaccctgtataaagcatggtttttggcaatgtggatttggtggcaaacacagcagacgaaatcctgaccctactgcagtggggaatagagggaggcagaaaggaatatatataagcaaaatatgtagagtattggtgttactgataaatgccaaagagaaaattaaagcaggaatagaggataggaagtatggaaggagagggttgcagttttaagcagaataatcaggaatggtctcattgagagggtaatatgcaagtcactgatggtagggtgagagtgagccaatggcgtagctagaggaagtgtttccaggcaaaagaagagcaagtgcaaagcccggagcagggagaatgcttgttgggagtgacagaaaaagaccacataaatgaaatggatttcagttgggctttaaagataaaataaagctgggcttttaagataataaagttaggcgaggcgcggtggctcatgcctgtaatcccagcactttgggaggccgaggcaggcagatcatgaggtcaagagatcaagaccatcctggctaatatggtgaaaccccatctctactaaaaatacaaaaaattagctgggtgtggtggcacatgcgtgtattcccagctacttgggaggctgaggcaggagaatcgcttgaatctgggaggcagaggttgcggtgagccaagattgcaccactgtactccagcctgggttatagagggagactccatctcaaaaaaaaaaaaaaaaaaaaaaaggataataacgttggttgtgcgttgacttcatttcagtagagtgtcttccacgtaatgacctctagcatcacaataaggccatgtttgcagagaggtatataggagcttcctgaaagttccaaagagctgcccactagataagcagaacttcagtgtgcagctttaattcttccaactatgcaaacagagccatttcttttagaggaactcagagcgtgtgggaagaacacatgcagttggaatatatcctgagaagagagaatcaaagtttgttcagactgatttttcaggcagtgccatccaacataatcacatgctggagccaaaaagcacatcactgacaaagtagccttctgtcatttcctgcattgctccaggaaaggcgagccggaccgccttccccatctgctgcaagtctctgttgaaggaaggacgctgtgctgcctggggaggttttgaaggcccagctaatgatggaatgcaaatgccgccaaaaggcctgagaagcagagcatcacccatatcccttctcaataggactagatagacacctgtatccacctctgcttggttttcttcatatccttaataagtacagtttgaacttgtggttgtgataacagccagctggctatttctgctgagatacccatgaagagactgacgatgatgtgacattttaatgccactgttcctttcttgaggaagctacctgagtgtgtatagcagctcacctattgacacatctgagttaaaagctgaggatgaggatgtctgtgtgtacaaggactatgtggtgggcactgatgtgagctaaacaggcagagtaaattctaaagagttgaacttgctcatatgactaaattcagtagttacacatttttgaaattaaattgaatagcaatagtgactctagtaataatctggatctctgcagattatattagtgaaaagcattgtggagtagaaacaggaaaaatgtcctcagtcaatgtttatcttgaacctggcaatcatagacatgtgggcttaggaggacaaattgggggattaaaaaaatagtattttgatgcagaggaaagccttagatgaatgctaagactgtttgctgaaatggttgggaaacagtatagtcaggtgatgccaaaacatcacctggctctaatgacaattaggaaaattgctattttactataaacagaaatggcagctacctccaagtgatcaagctgagcctcattcatggagggattttctggcattctttgccttatgaagcgatgccatgtgaagtcctcaacatcacttataaagcattcttaacaaaaatgtttatctgaatctcatcaaacttttaaatgtaacttccattttagaagaagcacagggaatagaaaaattaagggcactgtggaaaaacagacagatctagaacacggaacattctgcaagaaaactaacacgatcttttcaacaggcaggaatcatttacaaaatatggacttttctaaattaaagagactcagagttacaaagaaactcaaggcatgaatcctcatgggattctggattggagtgatggtggacaggcatgggcacacacacctttagaaaacattttggggactttcagggaactttggatatgggatggaagttaagtatatgaggaactattgcctattttcttagttgtgtaaatggctttgaagtgatgtgagacaaccctgttattttatttcatttttgagacagagtctcgctctgtcacccaggctggagtgcagtggtgccatctcagctcactgcaacctccacttcccaggttcaagtgattatcctgcctcagcctcctgagtagctgggacaacaggcacccgccaccatgcctagctaatttttgtatttttagtagaggtggggtttcaccatgttggccaggctggtctcagactcctgacctcaaatgatccacccaccttggcctcccaaggtgctgggattacaggccaactgtgttatttgtaagaaatatttgctggagttgtacagataaactatataatttactttcaaatcatttaaccaaaagcaagtgtgtgcacgtgtgtgaacatgcacatgcatgtgaacactcattacatttatatataaagagaggataaatccaaaaataaaagtagcgaatcttaataattgttcatcctaagtagaggatacattagtgtttgttgcatcattcttttagtttttccatatttgaaaatcttaaaaataaaattttggaaaagaaaatcatgaacacagagttcctggagaaacgatcagaggcagaaaacaaagaataccttttaaaaaaatgaagcatgaaaagaattagaaagaataaaagaggactgaaaatattcccaaaatgtcagtcataataattagtttaaattgatttaacatctatatcaaaagacgatgccttagattggataaaagtataataatccaacttcgtatttcttaaaatcagttatatgtttctataagagatacatataagatgaaagcaaataaaaatttaaaataaattttaaataaataaaatggtcattcacatagaagactactgctcagaagccaaaacttcttatatcttcaactgcaaagatgaatctcacagacatgatattggacgaatgaatccagacacacacacaaaaatatgatattctatttatataaaaagtttttaaaagaaggaataatcaatggtgatagaggtcagaatggtagttttatatgtgggccataatgaccaggaaggggtggaattgactgaaattctttttatatgttcctctatatggttaccacacagttgtgtaacgagtgaagattcactgaactgcggtcttgagatttctgttctttactatatgtgctttgccacaggacctggcatgccgattcctatgctgtgtgtcttaaatttcatttgagtggcagcctgcgtgggctttaaaccatggtgccatatgtacccacataaaaccaagtggttttgagaagctgagttttctttcacatcttaaagtccaagtaggaaagatgagtttagttcaggctgccttcttttgaattgacaagtactttatttttacttagaaattaagatttgcattcgttttttcgcatttccaagtggtgtacttttaaagatgcagtttatgattttcagaaatattctttaacatatttgtctctaagaccatttgcatctttaattttattcatttgctcatttactgagcctgtcagggattcattcatatgttattatttgatttttaaggaacacttgctgtggagagtagtattaggaaaaacatacttgttttagaagctggaagttctagatttgagtatggctccatcccctcctttctatgaaattataattaagttacttctttgattttcactttattgatccttgtaatgggtttaataatagtttaccaaggatgttatatcatccagagaatttagtatcactttaaaatcattcagtattctgtgtttgattaaagtgaataggcttctttcttgagaagtagatttataattgttactattgggaagaggattcgagtggaattcatttctttatttccttatactagctccgcatccatataatgggtcagtgtgttagatttcctttgaaaattaaaaagaaaaaatgattcaactgctaaaataaaactgatagccaatgttctagtacagtttcctgattattaggaatttggctaggaaatctggtcttcatacaagaagcaatattgttacacaatgggatttgagagaaaactctatgaaaatccttggccaaaaggaaatcaaacagagggtgtattagccaatgtctgctgtggcaataattccaaaatcttaacagtttacagcaacacatctttatctctcactcttgttacatgaggggtctggattgattggctgtgagtgtactgaatgcatctcaactcagctgaggttcacctgtgttcagaaatccaggaaggagggcaatgttgttctcatggtggagagttgaagctcaaggagggagggactgacctaattacatgcacttaaagcacattaactcacactgtattggccaaagcaagttgcatggccaagtccaaagtcataggaaacagttgcaagggctgagagggaatgaatgattcttgatagataactcaatctaggacaaaaaatgaaggttgctgtgagctgcagaatgtgcctttggtttgatttacatatccccaaatcctagggagagaatcatttttgccaaactttatctttactgaatcttttccaacctccaggatcacaagtatacttcatgcattaaaaaccttcccaaagttcattatcttttaccactatgtgctgtgaattctgaggtagcctatgataatttctgtaagaaattacttcaggatgtcaaaaatcagattaaatatagaattaagctgggattttgaaatttaatacccatttttttgagaaaatcaagtatttcaaaggtcctaatactgacatttttagtaagccgtatagacacttccggtcttctttgatagctacaaattttagctccatttcaagagaaagaactctggaacctaagcctaaatatatcctgaaaaaagaaaagaaagttgaggaattgagaagagtcaaatgattaatttgaaggagtaaccaggcaggtaacagcccagaaaatacacagaagttattttgattttctaacttggcctgctgttgttttggcagaaagatcgtgtgcaaggatatctaaaaataaataactctatttacataccatttttaataataaaatttgacttctcttcttttctgttatcaaaactctttctgttagtaatgaaaatttataattgcatctcctttagaaaatttataattgtgtctcctgtttcgttgcaacagctattttgtcctttaaatcataattctcagacatatttcaggtttcagtcatggagcttgaaatgctttattttctttgttgcttgcggaatacaatcatgaaatgggcaaaaaagcacaaggaaaacaaatggccctattgagatgagtggtctttaagatatcaaatgggaatcagatcatcacccagtttctgttaaaatctattgtcattcctctgctaagcaaatgagacttgttctgggtgattatatgacattattgtttgtatgctgtactgttgactcagtaggaaattatatgaagaaaagtcaatttcatagcagtagtattagattaacagtatctttcctgacttttaggcatttgtcatttatttattattttttgccataatcagtatcatctttactcttacgaatattttgttttaaatcaggttggtttttgtttaaataaatttacaataagagaaaacttttcttattaccatattaccattaatacaagaacagtatcacttgccatgaatagaaattaacttaataaaaaaatacaatggatagaaaataatattttaaaattctgagtatcttttgctgcctaaaagttgtgtgtgtgcttgtgtgtgtgtgtgtgttggcagggggtgaggcacagtggttaaagaacacataacataagacttacccacttaacaaactcttaagtgtacagtgcagtattgttaattacatgtacattgttttatagcagatctctagggcttttttaaatcacgtgtgactagaattctatattcgttaaacagcaacctcccattcccctctccctgcagtccctggaaaccaccatcctattttctgtttctatgagttcagctactttagataacctcatataagtggtaaccatgcagtatttgtcctttcgtgattgtcttcacatagcataatgttttcaaggttcatccgtgttggagcatatgacagaatttccttcttttttagggtgggataatagtatatggtatatgtatacattttctttttttatatatatatactttaagttctggggtacatgtgcagaatgtgcagttttgttacatagtatacacgtggtgtggtggttggctgcacccatcaacctgtcacctaccttaggtatttctcctaatgctatccctcccctagccctccatcccccgacaggccctggtgtgtgatgttcccctccctgtgtccatgtgttagccttgttcacctcccacttaggagtgagaacatgcggtgtttggttttctttcttgtgacagtttgctgagaataatggtttccagcttcatccatgtcccttcaaaagacatgaactcatccttttttatggctgcataatattgcatggtgtatatgttccacacacaactttacaagaaaaaaacaagcaaccccatcaaaaagtgggcaaagaatatgaagagacaccacattttctttatccatttatctgtcaatggataattaggttatttccctgttttgactattgtaaataatgctgccataaacatggaagtgaaaagatctcttcaagaccttgttttcaatttttttgaataaatactcagaagtaggattactgaatcatatagtagttctgtttctaattttttgaggaacctccacactctttccctaagtggctgcacctttttacattcccatcgagagcacacaaagtttccaatgtctccacatccttgctaacacttgttatcttttaggtctgtggggttgtttttttctgataatagccatcctaagagataggaggatgtggttatggttttcatttgcctttttctgatgattagtgatgttgagaatcttctgatatatccattggtcagtgtatgtcttctgtggagaaatgtctatctttgaatagacatttgcccattttaaaattggcttatttatttttacttttattatttttgctattgagttatacgaatttcttatatattttggctattaaccctttatcaaggatatggtttgcagatatttttctcatgctataggttgccttttcactctgttgattgtttcttttctatgtataaactttttagtttgatgtagtcctacttgtctatttttgctttcattgcctgtgtttttggtctcatatccaagaaatcactgtcaagaccactgtcataaagccttttccctctgttttattctaggagttttatagtttcaggtcttacatttaagtctctaatccattttgaattgattttttgtttatggtgaagtaagggtacaatttcattatttttcatatggatatacagattttgtagcatcatttgttgaaaagcctatcattttcctgttgtataaacttggcacccttgtgaaagaccattttattgtataagcatcaatttatttccaggttctctttctgttccatgtgtctgtatgtttgcctatgtgccagtaccatattatttagattattgtagctttgtagtatattttgaagcaactctggctttgttcttttatgttgattgttttgactatataaggttctttgtgttttcatatgaattttagctttgcttttcctatttctgaaaaaaaaaaaagctcctgggattttgatagagattacattgaatctgtagatcattttagattgtatgttaagtcttttttttaacaatgttaattttaacaatgttaagtctttcaatctatgaaaacaggatgcctttcaatttatctgtgtcttttaaaatgaatttcttcagtgttttctagttttcagtgtacaaatatttcatccacttggttatatttattcctaaatattttgggttttttgatgcaatagtaagtgagataattttcttaattttcttttgggattgtttattgttagtgtatagaaatacaactgattttttatgttgattttgtatcgtgccattttactgaatttgtttatttgttctaactttttttgtgtgtagatagaatctttagggttttctacatataaaattatgtcatcaacaaatggagataattttacttcttctcttcagatattgatgccttttacttctctttcttgtctaattgctctagctaggaattctattaccttgttgaataaatgtggtgatagttggcaccttttgacttgctcctgatcttaggaaaaaaaaatgttttcatttttcaccattgagtatatggtcttcatcatgttgaagtaatttttttctactcccattttgttgagtgtttttatcatgaaatgtattgaaatttgtcaaatgccttttctgcatctgttgaggtgatgatatacttttcatcctttcttctgttaatgtggtgtatccatcttgctatgtagaacccttgtatctgagagataaaccccactagatcatgatatattatccatttaatatgctgctgaattcagtttgctagtattttattgagaaatttgcatgtatattcatcagtgatattggccagtatttttcttttcttgtagtgtctatatctggctttggtatcacagtaatgttggtctcacagaatgaatttggaagcgttccttcctcttcagtttttttgaagaggttgagaagaatttgcattaattcttctttaaatgttttgtggaatacaccaacatttcttccaacaaagaaatacacaaaaagccatctgatcatgtgtatttctttgttggaagatttatgattaattattgaatcccttaatagttacaggtttgttccaagtttctatttcttcatgattcagtctacgtaggttgtatgtttccagaaatttatctacctcttctaggttatccaagctgttgactttttcttggtgtatcatcattcatggtagtctcataatccttttcatttctgtggcatcagaagtagtatctcctttcatttctgattagactccacttattttccttaacctagctatttgtcagtttcattgatctttcaaaaaccaattcttggtttcactggtttttcctagtgcttttctattctccatttcatttagttctaatctaatttttattatttcctttcttcttattattttgggcatagtttgctctgtttctagttccttggggtgtaaatttaggttgtttacttgaggtatctcttcttttttaatgtaggaatttaccattataatcttcttttttagtattgcttttgctacctcacacaaatttcggtatgctgtgtatttgttttcattcagctcagggtattttccaaattcccttttgattccttctttgatctattggttgtttaagattgtgctgtttaatttccacatactgtgattttttttcagttttccttctgttattgttttttagttttattccgtggtggttgggaaagatacttaattctgttattattttttagttttattctattgtggtaaggaaagatacttcaatttgtcaagacttgttttgttacctaacacatgatctatcctatgtgcacttaataagaaagtgtattctgctgctattgactgtatttgtccgttaagtttaattggtcttcagtgttgttcaagcactctgttttctttcttatataatctttggatgtcctatccattattgaaagtggggtattgaaatctcctactattattgtgttgctttctctttctctcttcaattctatcaatcaatgtttacttcatatatttggttgctctggtatgggatacatatatattataattgctatatcttactagttaattcatctttttttcattatagtgtccttctttgtctctcatgatagtttttgacttaaagcctatttaatctgatataagtattgccacccctactcttcttttgactgctgtttctatgggttatctttttccattttttcactctcagcctatgtgtgtccttaaatctaaagtgagtctcttgtagacagcatatcgttggacctggtttttaatttatcttttgatagggcagtttaagctatctccatttaaagtaattactgcaccaggcatagtggctcatacctgtaatcctagcactttgggaggctgaggcgagtggatcacttgaggtcccaacatggcaaaaccttgtctctactaaaaatacaaaaaaaaaaaaaaattagtcgagcacggtggtgcacacctatagtctcagctgctcagaaggctgaggcaggagaattgcttgaacccaggaggcagaggttagctgagatcacaccactgtgcacaagcctgggtgacagagtgagcctctgtttaaaaaataataataaataaataataaaaataaataaatattgataggaaatgattacttttatcattttattgttttctgtatttcttgtagctcttttgtccttatctttttctcttgctgtcgtatttgtgatttaaaaaattctttagggtcatattttgattccttcctcattttcttttgtgtgtctcttataggtatttcttttctggttgctgtggggcttatataacacattttatagttatgatcatctattttaagatgataacaacttgacttcaatcacatacaaaagctgaactattccaccagactcctttatgttatcattgtaacaaatttcatctttttattatgtatccattaacataattttatagtttttatacttttatctttttacttctatatcaaaattaaaagctgtttatacaatattcgtaacattacatgtaatgtaatgttatagtactataatatgtatttgtgtgtttgtatatatgtatatatactataatatatatttgtatgtgtgtgtatatatatatagtactataatatgtactcgtgtgtgtgtgtatatatatatacactataatatgtgtgtgtgtatatatatctagatatacacacacacacacacacacacaccttttccagtaaattatatattttcatttgctttcatgttactatctggtgtcctttcatttcaacttgaagaacttcctttagcatttcttataaggcagatttctttgtaagaggactattatgtcttgccttggttttctcatttgcaaaatagaatgatagtggaaataaatacatctttgaaaagttttatgtgacttgtaaatatctctgcaaaatttagttatcataagtattactttactttattactaaattactaaattattactatactttagcatgtgtattgaggaagtttccattatcacattatgaattagtgtagattgcaaggcttgtgtgtgttgtgtatgtgtgtgtgttgtgtgtgtgtgtgcacatgcccactaggtgtagttctgaggtagagacagagaccgttgctttaaaatttgattgtcctttgacccataaaattatgaccctggctgctctgggaatggtcatttgcttctcctgagcgggggtgttcagttgctgatttcctaaaccaatttcctaaatgggtaattgtgttctgactcatacaattccccctacatttcctgactatttcaggtgactatctcttcctctttgcccttaatggataggtaatgaagtcacatgtttcaaagtcattgctgtgtttcaggctggggtggactactcttacataatgtctcactagagagtcagaataaagttggcacacgtgctctacctccacctcaatttttaaccatgttgaaaagaaagaagtcttaaaatgagaggtggctttcaggggctaaagagcctctggttgaaagtgtttagttagtcattagtgtttcagatgcattaaaagcacaggctttagggttagtttgcttcattttttaagctgtgaacttggttgtatgactttaacctttcgcagtctagtttcctcatctgtgaaaaaggtgataatagtaatatttatttcacagagcttttatgaagatcaaatgagatagtctctataaaaatgctggccgggtgcagtggctcacgcctataatcccagcactttgggaggctgaggcgggcagatcacctgaggtcaggagtttgagaccagcctggccaaaatggtgaaaccctgtctctactaaaaatacaaaaaaattagctgagtgtggtggtgggcgcctgtaattccagctactcgggaggctgaagcaggagaatcgcttgaacctgggaggtggaggttgcagtgagctgagatcagcgtgggcaacagagaaagactccatctcaaacaacaacaataaactaggcacgttatgtggcatatgtgtggggaccaatgcatgttggcatcagtatgattgttttcattgattcagcccttcagtaagtcattgctggcaactcaagtctagctgggtgctgcagagagacaacaaataatacagtagagcttcatgcagcatttatgagaatagagagaagagaaatgttagttgacactaaggccagggcacatttcctagaggaagtggaccttgggggaaaagtgaaatttccctggagaaaagaagcaggaaagagaggcatttgccttctagaagcaccatacaagtaaatttatgggtgagttgggtctttcattcatatagtccacttataattattgagttctcaatatgtgaggggttctgtgtttgactcagggagcacaatgatgagcagagcaaaaacaaaacaaaacaaaaactattcctgccctatgtaactctcacttttcaggcaagatgggtgtgaaaccaataacaaataggaaaggtataggacatcattggatggtgtagccttgagactgactaggtgttaggatgggaggtgtccagtggggcctctgtgggtaactgagatttaaactgagacccatgtgggaatgggagtgaggtaaggagagatagagaaggccctgtgccaggagaaccacagtgtcttctgggaactgaacaaagtccacggtggctgagacatagagcacatgggaaaggtatagagaggacagtggtgagatagcgtgggcaagaccacagggggtcttggtggtcattctaaggatgcaggcttttgtcccacgtgcaatgggaagtcactgaagtgttctgtttatgcacagtaatatttcaagacttatgttttgaaaaaaaaatctgctatgtgcagcatgcattaatggggattaaaatggaagtggaaagatcaataagtagttgtgacaagatgatagtggcttgaattggggtagtggcaaaaaataaaaataaacaaacacatcaacagttgtatctggtgagtcctgaggcacttggtgtagttggagaataagatacatggtgctgagtcactgacgtgatcggtttgggcactttttgaggagaagtggtgtgacatttcatgctaagaaatttgcatttatactatgaaaagggctgatggagattaagaagcagagaaatgaaataatcagattagtgttgtgcatggaggatatttatttcacttcccacctactgcttgagctaagcatttattgaatttagagtaacagacgagagaaacggaacaacatcattgcaggcaaagattgatggaaagtggattcttttgtataacagcacaaaagagatatatgaaagggaggttaaacttgtcagtgtgaaaagctattgatcttgtaaatacttaccctgaagccacctaaggcttcgctcaggcatgacccaaatattccaaacctccaatgcagctgaggatgcggatgtaactggatgagagatgaccactgtggaaatataatgagccaagacactttgtgggaagggaggggtttacaaaagtgttaaaggagccaaggaattatgggagagagggaggagagagagaacgtctagtggggatggctttcctccctgctaggaagaaggcgccactgggtagtgttctcagagcctaaaacagaggccctgtaaccactgaggagctaggagtaagttagagacagtgggaaaatatttggaaaaccaaattcattatgtactttctatgatttggacctcaagtcaggggtcgtttctgagactcttgacgctgtatctctgactggtaaagagtgaaataatctagttatgaattggaccactcttccttcccttcccttccttgggttgatgtatttaagacacttacatggggaatactctgaagggatggaatatttggaggcttttgcagccagctgagaaagaaggctgtccacagagaccgaaacagacataagaactattggtcaagtggagtctttgggaggatttgaaaaactaaagaaaaaagaaaaaccaaaatgttctacctctgtgaagttttaagcttgttccacttaatacgtttcagaaaatttaataaggaaagataatttgttaaccatccttgcggtgtgttacagataatactaaactcacttaaatacatcttagctttcagatgtagatactttttcaacaggttgtgctcagctgtgctgtgccatactgatttccgggcctcacctttggtgttgtatactggagacattcattcagggagtgtgtcaaacttctaattgttcattttcaggttacagaactcaataatgtgaagaacgtagctcgattgccaaaaagcaccaagaaacatgccatagggatttatttcaatgacgatacctccaagacttttgcttgcgaatcaggtttgtctcaggcagggctggggggcttttgcttttagattctgaatggatgctgggcacacagtttaatctttttgacatttccacagatcttgaggctgatgagtggtgcaaagtactccagatggagtgtgtaggaacacggatcaatgacatcagccttggagagcctgacttactggccactggggttgagagagaacagagtggtatgtaaagaaaattctctcctctctctttcaaaactgcttctgtctccatatgataaaacataagacatcttcattatgtaaagtttttggggtataaaaatgtataaagaaataagtaatcttttatctaatccacaacctgtgttaacatttcagtgtatttttttcttattctttttccaattcataacatgaatgtatctacattaataatatcagttagaaattttggggaacctgctatgtgccagtttggtggaagatgcttaactcatctcagattatttattgtacttttcatagcagccctatggtgtaggtataattacttcctacgttttgcagatgaggaaactaaaatttagaggacgtaaagactttccttcaattctgttagctcactagtgtttgattctagacgataccgttggacctatattacagtttacagattttaaaatgtcatgggcattttttggtcatgcctttttcacttaaaatgttatcaacaactttccaatgttttcaatataattcaaactttatgactatttcaccaaatttaaacccatctaaaatctgtaattaaaaaaatacatattttattgaaacacttgagccaactctgagctcagcagtcaatctgggaatcaataatttaaaataataatgactaaaatattcatgaacacttcagcaaaaatcagtgttgatttacagaacaaacctggatgtgaggaatcattcctttgtctcctaacagctgagcctggggacggggtagatcagatcacagagttctgctgtaggctgacttgatctatgagggcatgtcaccatggaaaggtctgtgggtcatctggtttgattacggacatggcagagatggaattgtactgactttttctgtaggtgcacactccaatgttagtaaaaaaaatgctgtccctcccaattggaactatgtcttcatgacacatttacaatctgtgactctttggatgcaccatatctgccataacccatctccatggaaatgttattgaccgagacctagaagccctgggtaattcagaggagcctctttgtagattggaaaattgagctacagagaggttaagtcattgacggggttacacaaccaatccccaggctcctccttctctggttcactaaatcaggacaccccaggcagagaggatacctaggagccaagcataaagaaaacctggcaggttttgattatgattcattttttcacctagagtgctcagatcagcacttttcacaaatttgtatttggggaagcagtatcctgacagcaccacaatctgaatttaaaaattggcggtgcgtaggagatacctttcccacagcagctttctgtgcctcagtttcctcttctgttaaatggaaataatagctctggtctacaagtatcagggattattataaattcaactgtgtcctctcaggccctttccaatgttaattagtatgacttcaaatgattgtaattaaaatggtcactccaccattattgctattactctttttaaatttttattattattttttccctatctctcccctattgttattcttgagtgaggtaggactcagagaacttctaagcaaatagattgataatgatctctcttactttttacttaatatagacagtctttcttacttggaactttcaaggggggggaatatgctcaattagaatacatttttaaatatgattactagaaatcaacaaatatttgtttattgagaatatgaaataattaaaaatttttgaatagtagatcgcggaacacatttcatgaacactatctcagcattactatttactaaattcaactaaaatctatgaaaattcaaatgactatcttatcataaaacaatgtatttagaataccactaatataaaattgttaatgccacattgtcgtatgtaggcaatctaccataatgatgcataggtggaaatatgtttgctatagtaatatttttgttcatttttcactgaaagactttgactcaaaaacttcttaatgaattttccagaaatataacagaaatatggtgactgtatctgcagggatgaaaattaggttaatcagccaagcagtttatgtagaataattttggttgcattttagcaatcatccaaatatgcaatgaatatttctttccactatttggctaaaggaagttctttgttgaaactagttcaaatatatgcattggcattttcccaaattgttggccagttaagtgcatagtattactgtggcattttgtttaaatgattgaaatacagttttattcatttagttatagaaattacaagttgatcaatataactttaataacatggaaccatgacataattgttttgcacctgcatcttttgtgagcacaaaagtgtggatctagttaatgtgttcttggcaggaaaaaaaaattgcttttaatggttgtattgctttagtcttttattggcatatacatttttattatgcaaatttaaaaattctaaaaatggtcttcgctcatgtaaatagtgcttagtgtatgttgacaggctgtatcattattatgttatttaataggatctgcatttaagaaattattttctgggactgttaattaataggaaaggtttatctttctgaatatgcaaccgaaatctagaatgtgaacttgaattgtttttaaatgcctctatgttcctacaatgtctttgatgttttattcctggggattttagactaaccttttgtttttctcccagagagattcaatgtgtatttgatgccatctcctaacttagatgtacatggcgaatgtgccttgcagattacatatgagtatatctgtctttgggacgtccagaatcccagagtcaaactcatctcttggccgctaagcgccctgcggcggtatggacgtgatactacgtggttcacttttgaggcagggaggtgagtttaatgacttttaatgactatttttctgtttgtgtgtgtgtgtgttcatttttaccatgctcgcatcatatgaggcggtaggtttacatatgagatccagctgaagtacacttgaggaaattcatagagttgcgattacataatatgaggggtcttgtgaaatatttatatactcaacatggcttttctcccctgtggaagattttaatgtttcacacacatggtacaaattttcattacacagtttgattccatatcacaaactgaagttgatccaggtaaaaatgttaaaaaggtaccatttcctgggtcaagctgaacagaggccagcttcttgattttggaaaacttccatattattatttcacatatgtttcctcatctgagctaactgtggtagattattaatatgagggcccatggagtttttaccagctgcaatttcttgagttccatctatttggcttacagtgtaaggattctcatgaatactgaaagagattaatgctaaaacttgctctttgtgataccgactaagcactttccgggttttctctttttcctcttaggggttaatctgggagagattaaccagatagtatagtaaccaagccagtagtatatggattggttgctacctacaaaaagattcctctagccataatcctattttccttgtccttcagttttccctcagaatttaggcttcgtttgggaacactgcaggtaattttttttttttttttgagatggagtctcgctctgtcacccaggctggagtgtaggtggcacagtctcggctcactgcaagctccgcctcccgggttcacgccattctcctgcctcagcctcctgagtagctgggactacaggtgcccgccaccacgcctcgctaatttttttgtattttcagtagagatggggtttcaccgtgttagccaggatggtctcgatctcctgacctcgcgcttcggccttccaaagtgctgggattaccggcgtgagccaccacgcccggccagataaattttctattttagaattttaaatgcctaaattttaagaaatataagttcttctgtatatggcctgacattacactcaaattgaaaaccattaacttgtgatgttaaataaaaattgcttgtaaaagcagacagttattcctgacaggaatatgactcttgatataaggaaagtaaaaactgaagttctaaataccccaatccatgtgaatggataacagtagtggtcccctctaactaatctgttaattccattttaatgaacaaagcccaattatttaaaatttacattttacctgtagtcccagctactcagatggctgaggcaggagaatggcgtgaacctgggagatggagcttgcagtgggctgagatcacccactgcactccagcctgggtgacagagcgagactctgtctcccagaaaaaaaaaaaaattacattttaaataatcaaagcccaattatttaaaatttacatttcagaaatatgatcactttgatgttcttacaactgtctgcaaagttttttactttatacttttcatacagttcttttctggtctattttatttttaagtacctagaaacaagttggtgaatctttcaaagactataaaagttatcacaaaaaataaacctttaatgttgagagcaatgttcttattttgtgagaattacttatttattcttcttataagaaaatcccaggccaggacggtggcttatgcctgtaatccaagcacttcgggaggccaacacaggaggattgcttgagcccaggaatttgagagcaggctgggaaacacagggagaccccatctctccaaaatgtttctgttataaaaacacatgcacatgtatgttcatcaaagcactattcacaataacaaagacatggaatcaacccaaatgctcatcgatgatagactggataaagaaaatgtagtacatatataccatggaacactatgcagccataaaaaagaatgaatcacgtcctttgcagggacatggatggagctggaggcctaattccttagcaaaccaatataggaacagaaaactaaatactgcatgttctcacttataagtgggagttaaatcatgagaacatatggatacatagaagggaacaacacatatggggcctatctgagggtggaggatggggaagggagaggatcaggaaaaataaataatggatactaagcttaatacctgcatgatgaaacaatctgtacaataagtcaccacgacacaaatttacctatgtaacaaacctgtacatcctgcacaggtacccatgaacttaaaacaaaagttttttaaaaaagaaaataagaatacctattcatcattgggtatattgtacaaaaaataaaagcaaattaaatgaaaaaaaaattagccaggcatagtggcacacacctgtggtctcagctactccagagactgaggtgggaggatcacttgagcctgggaggtcgaggctacagtgagctatgatcttgccaatacactccagcctggggcgacagagtggaccttgtctcaaaagaaaacaacaatgacaaaagaaaatccctatagaaaatgaataattttttttggtaaggttggtatatttttccctttgggtctcagaaattatttatgcattaacgataaccagtgaaatctaagtattgaaaatgttttataaatagacttttctatgactgtacctctcatatcatctccattcatatttcatattgatgtgtaagagaattctgcattgatcaagactctttggatctgttttgggcagcacttattcaattattaatattttaaaatctttttttatttaccatttacaggaaatagtagtagaaaaaaagtatagctttttatggtaatgtttgaggatcaaaaccttagtaaactttattagtatctcatatctattttaaacttgaaaacatgttatcttattaattttccaggtataaaatgaacactgtacatatcctgcaaacgtttaatttattcatattgaaatctaacggaactgctaaggatttaggtgattacttaaaagacctcgatatttctcctaagtgctgtaggaaaccatagatacttggaggctggtatgtttgagtctctgtgtgtgtatgagatgtgtgtatatggggtgtgtgtgtatgtgatgtaattgtgttaatagtttataaagggctgggcgtggtggctcatgcctgtaatcccagcactttgggaggccaaggcgggcagatcacgaggtcaggagatcgagaccatcctggctaacacggtgaaaccccatctctactaaaaatacaaaaaattagccgggcgtggtagtgggcacctgtggtcccagctactcgggaggctgaggcaggagaatgcgtgaacccgggaggcggagcttgcagtgagctgagatcctgccactgcactccagcctgggtgacacagcgagactccatttaaaaaaaaaaagtttataaaggtcactttgatcacattgtgcacggtaggatagaggagataggtatggatgtgggagatattgaaccagttcaagtgaaacaatggtggatgaaaagatatatgggtgacaaagttgagaactatttcaatggtctttaccaacatgctgacttggaagatataagtgttttatcccatgactttgatgacccctttatggtccatccatttgcttatttcatccaagaactccactggttagatgattataatattcacaacccaggccactcaatgttatatctccaatatcgtagggacatagaatatttattgattttgaatagcattatttcttatgcattggtcatgttttgcagggctggtgcaaacttgagattgaatggtcagaaaggaaagtgtgggagttgtatgcttagcatcttacttctcaaacagcttggtgtagtatacaaagtactgattcagaatttagagagaccctgagtaatctctattttttgctagctgctaaccttggacaaagttcttaactttccttgtaagttgatcagagtaataactttcttgcaggtttgttgtaggtaaaggcagaaatgcatgtagatgacctggaaggatgctgggcttctcctaaatagtatctttggtattctattatgattacttttggagcagaacataagcttgcaggatagtgttaaatgcaaggtaaaattactattttatattttgcttgaaactcaaataaagataaatttttatacttaccatcaagatgctcaggataataagatcattcgtgttccacaccaagcgtgaaggtttcatgtctgccttgctttattagtgaagataagttttttccttggctatttttggatgtgttgaaacaaagcagttttatatcaaccagtataattttccccttctctcacatcgagaagtgagcaggagttgtctgtctaagcaagtagttttcacatatccaacatgcatctgcaaaaacttaacaatatcctctagaacacagggaatctttcttggacaaagttctgctcatgttcagcctctctcttagaactagaactgagtgttattcctgctcagtggctccgtttcaccccaccaaagctgacagtggggcatgtgtaacagactgaactggaagttggaggaaatgaagtaaaattacagttctatcacatactggctgtgggaacgtggatatgtcacttaactcaccgagctttttttcattgccacctgtaaattgggaacacatatattacttatctcaaaagattgctatgaagattaaataaaggcacatgtaaagacacctggaatagtgcctgaatgtagtaggcagttgtatccacccaaactagtactgaaaagaaactcattgacttccataaactcaaagtctgaggagtaaagatggcttcaggcttggcttggctcagtgtccaaatgataatcccaggttttatgtgacagttctgtttcttctaaaatagcttcattctagctccatatggtgactttcagaagctttgagatctccccacactatctcagtaaaagagagatatattactactctctgctgtcattatatatactatgtgtcaagcactgcactttacacaaagctcacagggtacaaatgcaatgaggttggttcactgaaggcaggaagagggtactgttgctatcagaagaggagtggaggtgaggcttttaaaaactaacaaaatatgtacaatatagcatttaataattgctcaaaacaaataaggtcaagaggctatttgactgtaattgacatttgcactcacaatagtgccgatttccagagcagtggttcttagctagaggtgattttgctcctaagggacatttgataatgtctggagacatttttgattgtcacaacctgggcagggggtgttactggcatctagtgcataaaagggccagagatgctgctacaggcacagaatagtccttgacaacaaaggattatcaggtctaatcatgtggttgagaaaccctactctagcaggtgtatgagccattgaaaatcatcactaccatttactgagcccttactatatgaaagcctctgtactaagaggctcattacctcatttgagctactcattatcatacaaactaggggatacagttatttccctcttaaaatgaaacctgggcaatggcaagaggtccgaagacacaaagctgataaattcaggactcacgctcagatcttttacttccaaactccatagatttttaagaaggctcaccttctactggaggttagcctagttcttagttaacttctgcagagctaagggagagaaagcatcttttacttccaaactccatagatttctaagaaggctcaccttctactggaggttagcctggttcttagttaacttctgcagagctaagggagagaaagcatgcttacataaccaaagcttgctaaatccattttggatgatcttgtgagcatattatcctttcccactgaagctgcctcaatgtgaggaaggcatctgtcaataagccacagacttgcaaagatgctggtgatgtaaatatgcctcctgagctgcgcactggggtataaatgttcttagtttgacttgactttttggaaccccctgtatgttctcttagtttggagtgtaggcacatacatctttccagggcagcactatgtggatcataggtcattagggtcttctgcacagtgtttttctccttctcctcctggtatcataaaatctgaccatattctctattttttgaggaaattcagaattagaatataacattttttaataagatgaaattgcacaattaattacccttggagacagagaataattagtttatcttgggggctaatggacatattgcttattttgtttgaagttttcttagtcttttgtttgtttctttccacttcaaagccctgaaacctcacggcacatcagactggcaggggcactaattttttatgggaagatccaattgacatgaagttctaactgcagcaaaatctcccttggaaccattcttgcaatgtgattgtgtagagaagggtggcaggtgtccagtccctttctctgttaactgtacagcttgctgctgagttagcatgcttcaatgtcagacttgccttacatcctgactgatttaaattaataccctgggtttcgcacctgcaggagccagagaagctcaggtgacatttggcagaacgtactaaataattaccgcacatgagtgcctttctttaccagctggagagagtctctcttgtgcttttgacatcgttttaagagaaacttttaggtatgccaaaaatatgtgaaaatccaaattgcatatacaaatacttttccttaaatggagttcacaagcggtttttgaaaaagatttttatttatttggatatgaaggcatctgaacagctttagaaaataatttgtttttttgtatatttcaccctaaaaccagcctaattggtgaaataacttttcattcaagaaaaaaactgtttactcctttaattggtgagtttacaggtaaaatgacaattgttttgatagcttatgaatattttctatttatttgaatatttgaaatatatgtgtatttgcatatttgaaagctacatattcccaatttatcttcttaggtagcttcttagtaatctctcatttctgaatgttttacagagcatacacttatccttattgaagaatttaaagcaagtaagcaatccagtatgctgagctcccccaactatgttgagtatgacaattagaatacaaatgtgctggatctaacacaagtttgctcaggagaagtaaagtcctcttcttttgtaagaaaaagggaacaaacattgtgtcatttaaatggccacttgttattcattagcattttcctcaaaaataattttaattacaaagataatgcacacattataaatattccaatagtagaggcatgtatgaaatcagaagggagcattctcttttctactccacggagtaacctctttaataatcatcttaatagatgtttcattattgcatgtctactgtctaccacacagtgtgctaagtgagaggtatgaagacaaacaagacaaggccaccattctaagaggcttagctagatcctatccacctctgagcttctgtgattttattaaatagcatgcaaaattcttgaaagaaaggatgacttttttctgacctttgaggcaaaattaggcactcagcaacataccttgtctgtggccatctttaatgtaggtgatggcccactggtgtttgtgattactttatatgagatggtgttttggaattctagaaagggctagtaaaaaagaatcattccttcctttatgcaatattcacctagtgcaccctaatgcctggtgtggttttaagcactgcagatgtagcagtgaaaacaacatacaacttactcaacagaagagagagatatagacaatgatgaacattttaaaaggtaaaatagatgttagattgagtcccacagtgaaaaataaagtagggaaggatgatagacagtgccaaagaaggggtgcaattttaaagagagtgagcaggactggctttactgagtacgtaatcttaagaggtgagagtgtgagccatgtaagaatctgggggaagagcattccttccagaaggaagatggaagaagatgctgaagaggaagtattcaaagaagagccaggaggttgatgtgtctgagcagaatcaatggatgggaagccacatgacacaggtggagatgcagcggggtcaggccatgtggagcttgaaggtggttgtgaagaatttggcttttagtcttagtctgatggggagccctcaggggctgtgtagagttggacaactacagagtttgagcaagtccccaagatggctctcacttctgacaccaactgcaagttcatgggtttctaaaactaccctaagatttagtaagtcactaaaatgactcccagaactcaccaaaagctattaaacacacagttatggtttatcacagcagggcatatagattgaaatcaagcaagcaaagaagtgcatgggaggatggagtccagagaagtaccaattgtggagcttctgttatcttctccctgtggaatccaggcatgctgctttcctcctgcctgcatgtgacattacacatggagcattgcctacctacatgcccctaagccaccactcacaaagattttactgggctccagtatgtacgtgtgattgattgattgattggtggatctcagtctccaggctgactgatatcacatgacctgaagccgttatcttgagttatattgttcctgtctagctcaagttttccaggcaggcaaacattaccttgcaggagatcctagcaaagggctatttttagatgaggttaaattcttctctatgctggaggtgttaggcaaagaagtgacataatcttttttttctttaagactttctcaggctaaaaccagttacggggtattgtagtactcatgtgagggacaagaatggctgtagccatgtgggtaacagtgaatatggtcttaagtcttggatgatgataggtttttaagctaaagccagaaggatttactgacagactggatgtgggctaagagggaaagggaagtgttagggaccctccaggagcagctaagactgcagagaaagggtgcagagtgagcactggggctgaggattttccagaggtcagttttggaaaggttaacttcagggctcattcagcagtttaccccacttactaaactgccatttcatcttgtcagagattagtaaagctacacattgtgtttgagtttagaactgttaaaagcactgctaattccaacccatttcttataactgctattgcaggaagaatgtgtgaaaatgctttcttcacacaaggagacagatcatatcataaagcaaaaatggaaaaaagtgatcttcctttgactttatgcacatcataagtgataaagaacagatacaattaataaacaaccactgtctgttatactagctttgttctatgactacagataattaatttattcttctgtttgttggttggtttttccaccaaccttcaagtccaggcagtaagtattagaatttacatctaaaagtgatagcgaaggtctctgtgcacatttgaggggactctggctgttaggaaacctgtgctagtgatgatgaaatggcaggaggagggccacagtgtggccctgcacagtctgcactggggcctttctcttcaccctgcacaccagctaggaagctttatatctcataaggtgtgctaatcctccagcacagacactgtacttcactggagctggagaaacaaaacacccaatttttgcatcctagtttttctttaattaaagctgatccttttcttagagggcgattcctgtttccaaattcatattttcattctcaaagaagaggtttattttattctgttttcacccacccatgagcctccacatcactctttctcccagtcacacacgttccattcccatacttcttagtcattcttgcttccctactgctgttctgggttgcagctgcccgcatttccttcaaggcaaatatgtggctgtgcctctctcgtgaggttttccaaagagtcctgttctctttggctttgacgttttaaagggttaaaatagcaacaacaacaaattctaattaaatgcttatttgatgccggatcctttgctaaatacaaaatgcaatctctcaccattctgtgtggtttgggaaaccttgttattcacatttgaaatatgaagtcatggagacttcgagaagtcaaggcacttgtccagggtcgtgattgcatcatgggagggagctgggattgagacttcttatcttccagacatagctccacatcacctggagcagggctctaggaactagacctgtgtttccaaaaatgtggtatgattttgggcagtagaggcgatgttaaataaatatgagtctcacggtgatagtcattttcttttccatttactttttgatctttttggttgaataatggagaaacatttcagttggatgccgcatgcctgacacacatctctaaaactttctaatgtacctgtgttactaagaagtgagcaaacttctagctcaaatctttgacagcaagaggatgtagcagaatttgataacaattttttaatgtattttttttagatggaatctctctctgttgcccaggctggagtgcagtggcgtgatctcggctcactgcaatctccacctcccgggttcaagcaattccttacctcagcctcccgagtagctgggattatagtcgcacaccgccatgcctggataatttttgtatttttagtagagatggggtttcatcatcttggccaggcagtcttgaagtcctgaccttgtgatccacccgcctaggcctcccaaagtgctgggattacaggcatgagccaccgcgcccagacttttaatgtattttttaagtctgctttcaatttataacaggggatactggtttgctattgatgtgatgattctaacttacaaaaatatattcgtttaaggaaaataaagcaagttgattaaaaatgaatcacgtaggtggcacaaagatttgacaaccatcatgaaagttgtttgtgaatgatggatgtcgccagctgtcccatgctcagaatcctgagtggcaagtgatacatgatgtgttatctcacatcaattcccatttctcaccctaccagtcatagaaagggctaggaaaacaattgcagtagcaggtgggccagattcccctgatttccagcgagtacacacacggggcactaggagaatagactgctgctttgtcttaagctgagatcaaccaggcagcaatgccagtgattggaacaggaaagacaacaaagatagtcaaccacagaatgtccttgtcatcccagtctgtactgaagcaacagttccctaaactcggacactgccttgtatagaaaacctcttaccaggtattcattacctgggttctcccttgtcctcattttggtctatttcaatgattttcaactggggatacttgtcaatgtctggagacacttttggttgttaaactgcagggtactactggcatctagtgagtagaggccggggatgctgctcagtaaactacaacgcccaggacagccctaataacaaagcacgatcagaccacgtcagtgttgctgactttagtagagctgagatcaagtccgtattacaagctccttagaaattcctcccaaatttattcctcacaatgaaactcctagaacctacgtggctaagcctcttgcttcttcatctcatgtctgtgaaagtacgttttcttgtcatagtgttgttggccttgctatagcctcagggggagggggaggggattgtactccacttgttcaaactgtattttttttttttttttttttttttgagacggagtcttgctctgtcgcccaggctggagtgcagtggcgcgatctcggctcactgcaagctccgcctcccgggttcacgccgttctcctgcctcagcctcccgagtagctgagactacaggcgcccgccaccatgcccggctaattttttgcattttgagtagagacggggtttcaccgtgttagccaggatggtctcgatctcctgacctagtgatccacccacctcggcctccctaagtactgggattacaggcatgagccaccgcgccccggcctcaaactgtatttttagtttgcctcactttcacagacaaaagtaaacattctgtgctttttttttttttacttttaattttatatccctctctgtcaggtgcttcggatctgtttctctcaggtttttggattccagattttcattttcccaacgctgacacccacccctcttctcaactgtacatttccttttttaattgccgcatcagtatggctcatgcaaccatgatattattctcaaatgttttgcatatgtagatcttgtctctccaaattaattctcagctcctcaaagagaaagcctatgtttacatccttcacagcggctgttatgctttgtctctgataggtgtaacaagtaccttattctttcaattataacgtaattgtaaatgtaaaatacaacattgatttaatagctgccttggcaggggtagggaaaaagaaaagcttaccttaaatatacatgttggccgggcacggtggctcatgcctgtaatcccagcactttgggaggctgaggtggatggatcacccgaggtcaggagttcgagaccagcctggccaagatggtgaaaccccatctcaactaaaaatataaaaattacccaggcgtggtggcaggtgcctgtaatcccagctacttaggaggctgaggcagagaattgcttgaacctggaaggtggaaaggttgcagtgagccaagatggtgccactgcactccagcctgggcaacagagcaagactgtgtctcaaaaaaaaaaaatatatatatatacacacacacacacacacacacgtatacacacacacacgttgaggtcaaaatgtgttctgcttttggcagtgtccatatattctacacacacacacacacacaaacacacacagagagagagagagacagagagagccatgtgcacagaatacatcttggaagcaagaaaatatgaaacttattggcttactgatttcaaatgtttacttattcattctgtctaccatgagataatttattttagttttcataatttcaaccccattagtatttttctaataagatatgttagtgtgcaatgttatgggcaaaacgagagaacagagtttctgaagttgggcactcagtgcatatgaaccatagtgtcttggtcttgaatcttcacagtacccaggatcacagtcccagcacatgcacacttgtgctctgtccactgggggctcagccccgcaggctacccctcttcccaccacctccccaacatgttggcttcacttacctgtgtcccaccttaaagctttatatgtgcagttctgtctgtcaaggctgtttttcctgccttctttctcaaaccactcccctccccagggtaactcaatgaattctcagtgtcagtaaaagttgctcaaggaagcctgggtcaggttcccggtgatgcttttcctagcactgccttctgcttcacaattcattctacagttatttattgaacatgaaatgtaaaccaagccatgctctaggcattagtggaaaagctgcgagtatatcagaacaaaatccccgtctacagggagcttacattctggtaaagtaatggaagctctctttacttcaagatgtaattgtgtactctacatatcctatttaatacttgcagtaaatctaggtgagagttcttagcattacatttgtttacatataaaaatgcagatttaggcaggttagatagctgacagtaggtcacaaagctggtgagatggcaggccagccaggtgatccctggtcaagctcctgcattctattatgttgcctttggtaggtggaagaatgaatccttcccaacattttctgagctattggttccttctgaattcttgaataattgaataatccatgattcggagtgacaggcatttcatttaggcaattattgggaaactcaaaactatacctgcatctatatggcagcaatattattatatttgaatccttatcatcacagaggaaattagaaaggcctaacttaaactttttttttaaccttctctgggtttccaatccactggtttccattaatgtacggagtgtttgggccacttggggccactttggatacaggaagagcatccagggtaaaaatcaatgggtaaagagaaaggaggaatcgggagcaacagaagttaaagcaggtggctttgctattctgctaaagggtaaacccattagaacatctttgttctgtgttgcattttctctggagacgagaagcagacatggctgtaggaggttatgtaagaccattagcctgtttgatgtgcctttcttttcacttcctttttttggtttgtttgttttcttcttactgccttggggagttagcccatcatatggttttgatggaggcatgtagtaacattttagagtgttgtaaagctgcttatgaaacggttccaaacacatcaattaggaggggtggataagataaaaggacttgtgggtagagtatagaagagacctgatggaagagcatctgaaggtcagtttgtggtcattagcatcttcatgggtcaggctgtccaatgaaggacacatggctttgagcaataggagcaaaagtcctaacaatttacaccaaaggcctcatttctgttctatttagagctcttaatgcattttgtgtctttaatgcacagtggtgatttcttggccagatctggttgattaaggccttttgactctcacaacttaaaaagaaaatgaaacaagttgctgacatataaaattcaggtgacttcacataaaagtcaagaagtcttgcttctcttaaacataatagaatgcaggagcttgatcagggatcacctggctggcctgccatctcaccagctttgtgacctactgtcagctatctaacctgtctaaacaatcagaaactgtgagtaccttggacgcgtatttccccattcccccacatagactcctgtctagggctgacttctggataccatgcttagacaggacctgtgctctctgctagctgcgctacctctaccctaggtcatagtgagtttgagcacctttatgcattcacgttctctgcctgaactctaatggaatttgaggttgtgtctcctgttgttttctgttagtggtaagtggtgtgtgtgtgtgtgtgtgtgtgtgtgtgtgtgttccagatcttcaggcagaggagagggaagtccatgtacattaaagaagaatgtttagtcctatagttttggtttcatttgtttttgataacaatatttatttagagatttaaatgtcattaagggaaggttgtggatttattatgtttcttaaaagtgggcattgggggccgggtgcagtgactcatgcctgtaatcccagcactttgggaggcagaggtgggcagatcacgaggtcaggagttcgagaccagcggccaaaatggtgaaaccccacctctactaaaaatacaaaaattagctgggagtggtggcacatgcctgtagtcccagctactcatgaggctgaggcagaagaattgcttgaacccgggaggtggaggttgcagtgagccaagatcgcaccactgcactccagcctgggcgacagagcgagactccatctaaaacaaaacaaaacaaaacaaaacaaaacaaaacaaaacaaaacaaagtgggcattgggtaagagtgattttccaagagtaaaattaattaatgggttatgatataaattaagcattccaccactagtattacaaataagatagaatagaaaataatagcatgttatagattgatgatagattgataggtatactggctaaaaatctaaactacatttcctacggcgggttgcagttaacaaagactttgaaagcaactagattgtccaagcttgagaaacatagctgcaagttttggtattaatctgtcacactacaagtatttctgagtaacaggtaccttcattacttctggaaccaaggttggcatttaaggaagtaaataaatatacagtgacctctgccccaggggaaaccagtggccactttttcctcttaaagaattgattaagattacttccttctcttgacaaattaatatttcctaattgatggaataaagatgtatgaaaaacaaaaccttacagaattggatgccaaacaatagagtcaagtttgtatggcggcttaaataaggaagaggaagtagaaagggtttaagtattttaagatgtcttcagggaagaaatgggactttactgaaaatgccttgaatttcagtttcagatcttctttgggttaaaatgacttaataattaaaatcacatgatcaacctcatgagctagttctttagattagcttattgaaagagccttcatgtttttccctctatttcttcttcttctttttttttttttttggtggggggatggcacctctctctgtcacccaggctggagtgcagtcgcatgatctcagctcactgcaacctccacctcccaggttcaagcaattctccctgcctcagcctccagagtagctgggattacaggtgccccccacaccatgcctggctaagttttgtattttttagtagagacagagtttcaccatgttggccaagctggtctcgaactcctgaccttagatcatccgcccaccttggcctcccaaagtgctgggattacaggtgtgagccaccacacccaaactccctctgtttcttcatacatggctcatattcataaaattcatgaaatttaattcaaatgtaatgggttttggcccactacttaggccatgccatatgtatagaaggctgtcatttggctgtggtactgggccaactgcgaaacattagatacatcttcctcgtattattgcattaactgcatagactgggctagactaaaaaaaataacagtggtttaggctgagaatttgcttagtttctatgctgtgttaaacagttctttagatgggagcaaaattcaggcactgaagctaccgttcagtttttcagcaagaaattctgaaatggaaggagtggcgttgtgtcttagaataattcggctctttaaaacaagcaagcaaacaaaacaacctcttagtttactgttggcatatgtatgtatcaaattcagagcttcttttaatatccctgcatatgattttgtccaagttctttaaaaatatttataataattaaatatatcttagtgtagttttatatatatacacacactaaaatatatatatagcatatatacacacacactaaaatatatagagagcatatatatacacacactaaaatatatagagagcatatatatacacatacatatactaaaatatatttaagtaaaaagcatttatttgtttcttgcctaattgtgtgtaccagtcttcccttattaatgaaatttatttctctttgtttacctttaccatctgaggtacagataccgttcttcttaacacttgatgttaattatcaaaaccatacaactttccgtgaagaacttctctaatgttccaaatattaattcagcacagtcatgctcattgaaaaaaaaattaactgcatttgatccatcacattgaatgaaagctggagtaatatttgatctaggattttaggaaggaaagaatccttaaagtcatggtctgtagggaaagcgagaacagaatctaagagacatagaatctttctgtctctctgcgctggcagtttctgatgaggagctattcacagactgtacaaaggaatacgcttgcacaggtatttctctttgagagtggcaaggtgaaggatagggaaggtgaagtatttattatactgcaaatcaagaaacagcttttttttaaaaaaaatttctgttttactttgtgataaaaccattcagcacaggttagcctggagtcccttggtcccctgcccttgttaataacaattaattgaacactttgaacattccgattctagttaactttgtttaacaaatgtgaacaagaataaaaaataataaatgggcgcagcctaatggagtatgccaggatcttggtgcattgaacttctaggcgctggattttcagaagctgttttgtttttgttttcacaggatgtgtgagactggtgaagggctgtttatctttcagacccgagacggggaggccatctatcagaaagtccactctgctgccttggccatagccgagcagcacgagcgcttgctacagagtgtgaaaaactcgatggtacgtttggaatttcttcctcgtgtcccagtgcctatcactgcagaaagcaattgggtcatttttgtgctggaaaatatggtcagcattatttgagcagatgactgattcctcttctcaacagtgtatcacttggattaaatggcattccagaatgcctgatgtgggccgttggtaataccttggccatacatccccattatctactttacaactcaatcgtaagggtgtgtaaaactaatttgcgtgtgtacagacatctatagacacaaccatgtggatcatctacctatggagatatgtcttgctatgtcagaagttatttcaaatgtcaacaggggccagagagaaaaatgtaaatgaaagaagagggctgagggaaactggagtgaaatgtcaaaagcccaagaccagacaactgttgacatgagaacaagagattgtgacatccatctaggtagatcccttgatttttcaagggaagccaaagatttgagtctatatgtaatacctgctagttggtaactgttggaaattaattctagttaagagtgcaacactttgtgggtcaaagagaacctgtctgcgggtgaactgctacccacagccatgcgtgtgccatctcttcacagtcatcggtatataaagatgcccaaacataaacacatagcacacataaacatgccctcagaacacttactctttgctttacactgtgctggggacttggattacataaataattatgttcatgaggccaggtgcggtggctcactcttgtaatcccagaactgtaatcaggctgaggcagactgattgcttgagcccagaagtttgagaccagcctggacaacatggggagaccctgtctctacaaaaatacaaaaattagccaggtgtggtggtatgcgactgtagttccggctactcaagaggctgagataggaggatcacttgagcccaggaggtgaaggctacagtgagccgagtttgtgccactgcacttcagcctgagtgacaaagagagacactgcctaaaaatttaaaaaaaataataataattatgttcatgagttttttctttaaggagggtaaattcatgaaatcataaatcataaatgaatgcacaacacttaagtaatgcacatcatgcgttgtggctgcaaatgtatatatagagcttcacatctggaaggaaatatacaaaacaaaaaggaattgcgttggcaagattagggtagtttgaaactttatgattgaaacatgtggggtggttggatttaaagagtggaggggcaaagcatgccagtaatgtgatctgttccaacacagccccgggttattcccaaatgacgtctataggcagcaatccgggattttagagccggggtcagcaaatcttcctgtaaagagacagtaaatgttttatgctttgtggactaacatggcctgcaagtacttaactgcccttgtagcacagctgcagctattggaaagatgtaatcaaatgagcatggccatgtctcaaaacaaactttattaatggacattgagatacaaatttcatataattttcacatgtcaggaaatattactcttctgttgattttctctcaaccattaaaaagtgcaggtttttttcattgtttgttttttgcatatgggtcattcagaaacagtcagcaggctggatttgggccgcaggacagagcttatacttggaaaagagcaagtgcctgcccccgtgagccagtgctgacgtaagcatttgcgagaaaccaggcttgaagacttgtgtatgatttcagaggtggtggacgtgggcatgctgaggaggcctggaatgaattaagggattctgatggttgtttttatatgtcaacctgactgggacacagggtgcctagatatttggttaaactttcttgtgagtatgtctctgagggtgttcctgagtgacagtaatatttgaaatgatagattgagtaaagcaaattgccctctgctatgtgagtgggcctcatccaatctgatggaggccagaatagaacaaaaggagggtaagagagaattagctctctttgtggtcttgagttgggacattggtctcctttggccttcaaatccagaccagaaaccatcaccattggctttcaggccttcagactgcatatcttggtgtatatatcctatttactctgtttctggaaaactgtgactaatataactaatttaggggtagaaacagataaaacagagataaatttcagtgccatcatacagtgttcaagatcatggcccgtgaagccagacttagttccaacaccatttctgaaacattccagctttgtggaggagaacaaagttcttgatatccctgagctccagttttctcctttgtaaaatgggaagggtaatagtatttatcttaaagacccctcttaaagtttaagtgagatatgctcataacatgttcagcccagagctcattatatagctttccatgaactgtagctgttattactgttgttaatagctgagccatcattagcattgctgttaatagctgagcagactggttggtccagattgatcctagcaatggctgatgaaaatggctggaggattatctagtaacaacatctaagcccatttacatctgcgcctcatctctctctctctctctctctctctcgtcacctctctctctctctcgccatctctctctctctcgccatctctctctctttctaaatgtctaagtagagcaaatgtaaaattagattgagaaggaatggggaatgatataatttaatagattttagagaattagaacctactataagaaactataagaaatcattatatttattattttcttatttcaaaaggaatctacacattattgaaaaattgtagacaacacagcagaacaaaaagaacatagtaagtcatccctctgcccgccacacaagaacatacctgtttctcacttttgagtgggtagctttccagtattttaactaggtggatgtagaaaatagaattatattgaatacattgcttgtgctagctttttgcaagaaaatgtctatatattgtctctttaaatatcatctgcaacatcatattttgtggtcctattttattatatggatatttcatagatttttaaaactatgcatcaaggttgggtacggtggctcacacctgtaatcccaatattttaggaggcctaggcaggaggatcacttgagaccagaagtttgagaccagtctgggcaaaatggtaagatctggtctctacaaaaaatttaaaaactagttaggtacagtggcttgtgcctgtcctcccagctactcaggaggctgaggcaggaggatactttggccccaggaattcaaggcagcagtgagctaggttcccgccactgcactccagtctgggtgacaaagggagaccccatctctaatatatatacatatatatatggttatatatatttatttatatatatggttatatatatttatatttgagtttatatgtatacataaaacaacaacaaaaaacctgtgcatcagcttgatgctcagtctgtatgcatcaatgactatctgtttaagataaattcttaaaacttgattgctgaatcaaagtctgagaatgcttttaaggatttgcttttctttccaagcagccttccaggaagactttcttttcgaactaatacaatcttggtatttattttcccatgtacttagaaattctggatatttcaataaagagacatcagtggatggatggagagagacagagggaggggaatgcgagagagagtgagagcgagctgtgaagtagaattcaagtcactgaaaacttacagggcaacatgtcattgtattagtgttgtgcggctattccattagatccctttaggcacctgaagaagtttgtctaagattgtcttgttcgtagagccatcaattagcataaattgttttgtacttgaaaggcgggttctgcatgctcatgcacatgtttttccatttacaacctcctcattatttccgctaaaaattaatcaggaatatgagtaaatcgtttggattatccctttgcaaatttaactagaaaataatgtcacttgctcttaatttgctgtatgcttaatgggttctataaaataaatgtgatttttaaagccacggcatcctgttatagatggaaatgagtaagcttcaacatggatctgaatcttaaggagttaaacgagggattgtgaaaagcttaaaatcaatgtactttagtcaatctctgattaggggataccatgctaaaataaaacaaatgaaggcaacattactggctcaccctgcctcggttattgttttgccttttctggtaattaagagtggatccacatagccctggctacattccccactaggaattgcctttatatgactgctgacttgcttctatgagatggccaagttcataaccggagaaagacggcaaaactcatatctggccatagcctcactattaggaagtcctaactcattgtttactgtcactgttgtaaaattcccaagagtgtgtctacagacagaatgttgcactgtggggccaataccaggctgaaattacagcctggagtgaattgatttcagtcagccttatgaccctcaatcccaaaactcataaagaaggggcctgtgggtccgataataatagtaacagttgtgggaggctgaataatggctccccaaatacgcccgcattctaatctatgcagtctgtgaatgttaccttacaaggcaaaagggactttgcaggtgtgatcgagttaaggatcctgagatggcgacagtatcctggtctatccaggtgggtcgaatataatcacaattgtcttcagaagagggaaacaagaggagtcaaacagagggcaaggcaatggtggaagcagagagacagagatagagaaggggtggagagggagattttaaaatgccacgcagctggctttgaaggtggaagaagggactgtgagccaaaagatgtttgtggccttgagaagttagaaaaggcataaaaacagcctagcgcagtggctcatgcctgtaatcccaacactttgggaggccgaggtgggtggatcacgaggtcaagagattgagaccagcctggccaacatggtgaaaccctgtctctactaaaaatacaaaaattagctgggcgtggtggcgtgtgcctgtagtcccagctactgaggcaggagaattgtttgaacctgggaggtggaggttgcagtgagccaagattgcgccactgcactccagcctggtgacagagcgagactccatctcaaaaaaaaaaaggcataaaaacaggttctcccccagaacctccagaaggagccagccctgttgatgccttgaccacagccaagagaaactgatttgggacttctggcctctagaaccgtaagacaataaatttgtgtggttttatgccaccacttgctggtaatttgtttcgacagccatagaaaactaatataataataataacaaaacaagaatgtgttatatctctgctctgtaacagacaatgtgttaaggacattttgtgtaatttctaaacctcatgaaaactcttgcattgaagaccccaaaccaccagcttagaaggtattagggctcaaatttggaacaggtgtgctgacataacccctgccttacactgtatctttgaatcaagcccctagacacgttttctttatcctacatgagattaactcactgttattctgaaaactccaaattagtgaccaacatttaaaaattgagagctaacacataaatctcagatttttatattttcttgaaaagtgcaaagctctggcagtgctgatcttgcatcctgacaaggcaatgcttagatacacccagtagtgtctgtcctcacacatctttctctgggaccttgctactgatgctgtggctaactgatgtctatattactatataaattaattttctattgccatgtaacaaagtaccacaaactatgcaccattaaaacaacatccatttattatttcacagtttctgtgggtcaggagttttggcatagcatagtggaccttcctctccagtttttcacaagcctgtaatgtaggtttctgttggggctgcagtctcatctcaaggtaaaagtggggaaggatccactttctttttttttttttcttttttttttttttttgtgtagagaaggagtctcactctgtcgcccaggctggagtgcagtggcgctatctcggctcactgcacgctccgcctcctgagttcacccaccattctcctgcctcagcctcccgagtagctgagactacaggcgcctgccaccacacccggctaatttttttgtatttttagtggagacggggtttcaccttgttagccaggatggtctcgatctcctgacctcatgatccacccgccttggcctcccaaagtgctgggattacaggcgtgagccactgcgcccagccaaggatccactttcaagctcacatggttattggtggaatttagctacttggggttgtgggattgagggctacagtttcttgctggctgttggacagaggccactctcagctcctggccacatggaccttgccagcacagccacatacttcatcaaagccagcaagagggcacaatcctatgtatcacaatcatggaaggattattttattcatcttatcactctgccatagtctgtcgatttttttttctttttttttggagacagagtcttgctctgttacccaggctgaactgcagtggtgcaatcacagctcactgcagcctcgacctcctcccacctcagcctcctgagtatctaggactactggcatgcatcaccatgtctggttccttttatttattatttattttttgtagacatgaggtctccctataatgttgcccaggctggtctcaaactctgggtttaagcaaacctttttcctccgcctctcaaagtgctgagattacaggtatgagccactgtacccagccagtctgttgactaaaagcaaatcataagccctgtgcatacaaaggaagggcaccacacaagggtatgcccaccaggaggatgagatcatggggccacctcagtgtctgtcccctgcactgtgaaactttctggaataatatttacttagtggtttgatttttcacttttaaatatttttcctactttatggcacttgctagtaatacgatgtatttattgaacatctactatatgcccaactctttagtaataatagccactgttatttttcaggcctcctacaatatagcagatactttacttgccttttctctaatcaccacaataactctgaggtagattcatttgttcactctcattcatttgaccatttaaacatgtttattgagaacctactatgttctgttttgtgtggcaggataccgtggcaagtagacacttgaggcctatgctcctacagggcttacaatggaaaagaatattcatgatccctgacctggaaggaatcactgtcctatgatatagatgagaaaagggatgttcagcatggcgaagtcatttgtctgcagctacgtagctcattactactggagccaggaatgcagggtggttttatctggttccaaaactctacctctggccatgatgcctcactcctttgaagggttttaaagctcttatgtccccactgagcatggtcttagcattttcccttttttttcccttttttttttttgagacagactctcactctgtagcccaggctggagtgcaatggcatgatctcagctcactgaaacctctgcctcccgggttcaagcgattcttccccctcagcctccctagtagttgggattataggcacctgccagcacgcctggctaattttttgtatttatagtagagacggtgtttcactatgttggccagactggccttgaactcctgaccttgtggtctgcccgcctcagcctcccaaagtgctgggaccacaggcatgagccactgcacctggccggtctcagcattttcaaatgaccttgataatcagagtacctttcagaagcatctatcaatgtataatatatctttttaaaaaatcactgttagggctgagcacagtgactcatgcctataatcttagcactttgagaggccaaggcaggaggattgtttgaggccaggagttagagaccaacctgggaaacatagggagaccccatctctagaaatatttaaaaattagcccagcatgatggtgcatgcctgcagttctagctcctgggaaggctgaggtgggaggatgacttgagtccaggagatccaggctgcagtgagctatgatagtgctactgccctccagcctgggcaacagaacaagaccttgtttcaataaattatatatatatatatatatatatatatatatatatatatatatatatatatgaaaaatcactgttaaatgaaatctcatttatttgtgtagttttggctttagatagcagtcttgccactttattatttctcgtctacatttccactttaaaaattcaatgcattgttattattcactctaaagggggtgctggaagaagtgggggtgggcctggagtatgaggtggagcactaactgtgaatgaggcggggaggcgaggactgtcttgcaccagctgccagctgccttgctggagaagccgcagcaaaacttcaggacagctcaggcactcccctgagcagctatagctatttttgccacctttgagatcagtgtctatgacaaagtctaattttggaacaaggcgtggcagtgtgtgggatattcctcattccacgactgggcttgtcatttttagactttccttcaaggcgagagcctcaaggtgaagaatgcctgcttttaacaggtttttccaggggctccgggtggggtgagggggccccactgagggggacgttcaggcccctgggtgacttctgccctgtactctggagtcctgattacacacaggcttgagagttcaatctgaacttttttttgtcacttctttgtgtttctttgtttaaaggattgatttacttccaagctgggatttgcaaatacaatttgctaatgaatttgtagaattcaagtggcattcttccataatttttgaaatcaaattaatttatattcaatctaattttaaacgcaatatgctacacatttggctttcttagatatagaaggcatcaaagaaatcatagagtcaatttcattactattcagacactaaagtagaccctcgcatggtggagttttatgtgtgtaaacgctcttttcacaactcagcatctcctactctcccttgtacctccccaccacaagaaaatctgtctttccctcttctatttatgggctctggttaattgggttaacttatggattttttaaaatgtgctgcttaaagcaattatcattttccccctcctgaattaagccctttttatatcctggcatattaattatccttcaaaaaacttttatgaaatacctatttgctacttgcaaagcaatgtgttagatcttatggagaatatataataaagcataatttgttttcatcttttatttattgattgattgattttgagacagagtcttgctctgttgcccaggctggagtgcagcggtgcaatctcggctcactgcaacccccgcctcccgggttcaagtgattctcctgtctcagcctcccaagtagctgggattacaggcacctgccaccatgcccagctaatttttgtatttttagtagacacagggtttcaccatgttggccaggctggtctcaaactcctgacctcaagtgatgtgccagcctctgcctcccaaagtgctgggattacaggcatgagccacagcgcctggcatttgttttcatctttaaaggagcttaccatttaaataaggagttttaaatataccccttatgcaacagtgtaattctgtgggttcaatttgctatggtctctttggatgaccatatttattgaaattaaatccacacatctttttattcaacagtagtgcttctaggaatttactctgacgtatactagcagaagtgaagatgatgcgtacacaaatgttcacgggaggactccttcctttattcttagattcctctttttaacaagtatttgctgagccctgctgcccactagatagtatacgaggtgctggggaaatggctctgaagaagatgaagttcccattcttgcggagcttatttgtaagagcagaaataactagaaagaagttaagtgtccaccacaaggggacagattatggcacatgatataacaagaattacatgaggcagctaactagaaatagaggagattcatgtatagtaatgaccacatgaagagagtcatatataatcatatcaacgtgtgtaaaggaaatgaatggatatgaggcagatctcaaggtggattctgacaccttcactaacgctattataagtgcagaaaattaacttatggcagggtacaaatggatgtgttagtgttggctaccctttgggagcaagactatgatttggagagtctgggaagaggctttcatgtattactttatgtctttctctttgtttaacagttttaaatcatggctatataatatatttttggaaaaagaaacagtggttgagtttctggcatatggcaaatgtaattgattcaactggtaagagagagggagggttctttcacttcaagtacataaaaatgcatgattggctgggtgcggtggctcacgcctgtaatcccagcactttggaaggctgaagcgggcagatcacttgaggtcaggaggttgagaccagcctggccaacatggtgaaaccctgtctctactaaaaatacaattagccaggcatggtggcaggtgcctgtaatcccagctacttgggaggctgaggcaggagaatcgcttgaacccggaaagtggaggttgcagtgagctgagattgcaccactgcgctctagcctgggcaatagaacgagactcggcctcaaaaaaaaaaaaatcacgattaaagatgataacgccttaacatactgtatcaaagggtgctaccatcccatttttatggcttaggagtttgaagtgtggatgcacagataggaagtgataaagccaagctttaaacccaggtggccactggctccggttcccacacttgcaccactatgctgtacttactcatgaattctttagaaattaaaagaagctaaatgggctgggcactgcagctcacacctgtaatcccagcactttgggaggctgaggcaggatgatccacgaggtcaggagatcaagaccatcttgaccaatatgctgaaaccccgtctctactacacatacaaaaattagctgggcgtggtggcgcatgcctgtagtcccagctacttgggaggttgaggcaggagtatcgcttgaacccaggagtcggaggttgcagtgagccgagatcacgccatgaactccagcctggcaacagagcagcactccatctcaaaaaaaaagaaaaaataaaaaaaataaaataaaaaaaagagctaaatgagattaacctacatttactaatagacatttaacagagaccaaactgtttattcagacaggatagatgtggatgaaactcaggcttcttccttaaatttgcgatggctttgttcctgtgtattaggggaagaaaatctcattttctcagcacttctgtttcagtctcttataacaacgtaataacttgcaacgtgcaggggtgtgttttaatagtgctttcacctgattattaaatgctgccttagcttacacagctcctccctggagctgggagctcctgtcacggtgccagggatgttggttgactcgtggctatgcctctattggaaaaggagacaacttgttttgctgacagatcgtggctttgtttataaactcgaaaactagttttaatacttgagatgggggctccgtcagtaggcagtacattgcgaccttgatggcggcaaggcagcctgtcatgccacgacccttccctcatttggagatgttcacttcagagcataaaatcacacgtgcatctgcttgaccgtgtgggcggtggtgagtaatcctatttcccagtgtcgagcatggcaaagaagagagagatagaaatagtgatgaggactgagagaagaaagaaatcaattcagtgcagtttctgatctgttttgggaagtcaaggagtaagtttaaaaactcttaagatttttgaaatggtggtagcagggcatgaaatcaagtacaggacccttctaagcacagagccccgtatgactgcacacactgtactcctgtgaagccagccccagtgaagagttatgcctggggaacatacataaacagtatgtgagcaagcaaattggaacgcgtagtcaccctaaaacagcggttctcaattagtggcagttttatttcccaggagacatttggcagtatctggagtcatttctggctgtcaacaatggggtcccattggcatctggtggatagaggccaggagtgctgtaagttccatacaatgcttaggacagcccccctgccctcgacaaagaatgagcttgccccaaatgtcaatagggccaaggttgagaacgcttgctcttctgatagacaggttctgcttgaagctgggccagaattggatgggtctgtgtgtttggggttgaatatcgcttatgagctgtgcaacccagcttctgtttgccttgttcacatcatatgtaataagtgggtgatactaatgtctctgcctggttttgttagttcacatgagctagtgcatgtaaggcaacgagacgaggcatagtaagattcaacacatgtgaactattacagtgatttcgtctttttttatttttatttttatttttctgagatggagtgtcgctctgtcgcccaggctggagtacagtggtgcaatcttggctcaatgcaacctccatctcctgggttcaagcaattctcctgcctcagcctcctgactagctgggactacaggcgcccaccaccatgcctggctaattttttgtatttttagtagagacagggtttcaccatgttagccaagatggtctcgatctcctgacctcatgatccacccaccttggcctgccaaagtgcttggattacaggcgtgagccactgcacccggccagtgatttccttcttacttacacaaaccaatatgagttgggcgaggagaaagagactcaccttgaagcaatggggatataaacaggaaacaccaggaatttgaatgatggagccgagagctcttgtttccttaagaccctgatgatgtttgtgcagtattaaagaatagagcaagcacaaccacatgtgactatgaggtaaggcccctgtcttctgtgcagctcatagcctagtactcagcaggaattccagaaatacgcacagtcagttatacctgctttgtaaagcaaagtgcaacaagaaaacaatatgtgaatacatggtgtaggcgattctgcccagcagcccaccccttcaccctggcatgtgcttggcatcttgtcacaaaagcacctgcttccactgagtgtgagcctagtgtttaaagggacaatctgattatatgtgatttttatgttatgcattaactttaaaagctgacctctgagtaagtggcagctccattcgagcctgtaaacctctggaaggcagggacaaggccccatgggtgtgtaataagctcagggtctggcacagggcttaaaggtttgttgaatgaacaaaatagggatcaaataagttattgtgtgagccaagagaaaaagaaaaatcgaagccaaaataccaagtccagttctctcctaatgcccaaacagggcacaggttccaggcaagtctgctttaaaaggccacagaaaactcagtccctaaggatatctatttcaatgtataggtgggggagagaatttttttagtaaggaggcagaaaaagttaccggaggcaaagggagcagtgaatttgttttatgcatgtggctgagaattcagatggctccgaataaattgatgcaaatcactttcattccccatgaaaataaccatttgagtgcatctggtgctcggcaacatgctgcacttggaaatttggccccaaatggttgatttcactaacagtctgctttgtcaaagctgtaagccacaatggaggcattgtttctgccagagtctgctcactgtgtagtgtctttgctgcatgtttttttttttcccttagcaggaaagcggtctttctttcttacccacatttttttttctaacatcgaggaagtaagcctctactcactctattttcttgacagtttcataatattctgtgataccttggtaacatttggatgataggagtacccatcacttttcctccaaatgtcagaacaaaagagaggacttggagaaagtaaagacagctctttgggtggttcctgccaaacatctgtcagagctggaatcagaattaggcagcccatgaggactggttcattagaatgtcggggaagaccacatgtttggcagatcgttaatttccacttgaaagaaggcccctgggacagtgggggtccaagggcctcatagaggttctaatctcctgtttttccagatggtgggggcagcgtcatctccttgcagcctagacgtttggccagttgccatttctttaagctttggaaatacagttaaggtgccttttatcatttggaacggagtagatttgagtccatcctttaggatctgtataatactctcagtactttctatgagaaatatgtagaattgtgttatgaactgtagctctggagtaagaggccaggtcctatatcctggctggacatctttaccagctcagggtcctcgggctactaactttaccacccttagtacttgttcccccttctacaaagtgtggattatattagttcacaacttgccaggtgagataaggcaggtgatttcttggcacagtgcctggtacctattaaatatagcagcaacctgagctgttattattactgacttgtagtgggagaataaaatggcaagggaaggcagattatagggaatccccattcacacaaatgattcattcatttcttcaatcaattcatccatccataattcaattatccaatccctttttattaaatgcctactatatgccaggaatcatggtgggcacgacatctatgagcatatacaagaaatctctgccttcaggaaggagaacgctgctgcgaggagggtcttctctcctttttagaggaaggagcaccgttgtggaggcagacaatgatatatccaaagcttggctttcaactagctgtctgaccagacactctaaaatcctgggggacagagaaagtgtgaaagtttttattcattttaagtttgcagaccctggcacagtgtgtggcttataaatgatgcccagagtacatacatggatgggatgagggaatgaatgagccgaagaacaccgagtgcagaattcatcgaaaggggtgagggaaagagcggaggtttttaggtaggaagcatgtgagcagaaaacccagttaggaggcttcttctaattgagggataattagagttggaatgagtggctccatctggctctttgctgagagtctgcgtgctttatttccttcaattttcacaactatccttggagatagggactggtttttgaatcttatttatttttacataaacacatgtctgtaaaatttaactaactgcaaaattatggtcatatagatgatgattagtgctctattttttctttttataatttgtttacatgcattttccccctcctgtctctttattagcaattcctaaccttgttaagaagttcacatgtacctttccatgttttcctgtgtacccatattatcctgtacagatatgcacatctacatatatacatagacacatacacagatacatacaaaagatgggtgtcgtgatgcaattgtttattttacaaaattgtgatcacaacacacgactaacccctagtttttccgttcaacagtaaacatttaatggaaatagtttgaagtcttgtagtacagttgtaattcagaggttgacaaactacagcccacgggtgcaatctggcctatgactgtttttataatttaaattttattggaacacagctacatcctccctgttcatttatgagttgttgttcacactgaaacagcagagtcgagtagttggtgatggtgtggcctgcaaagccatttactatctggtccaaaacagaaaagtttgccgactttgttcctattcattctttttgatggctgcatgatatttcagagtcttgatgtaacataatttattaaacgtacgtataagaatatcagattttttgccattaaaacaatactctttgactgtgaagtgagtccctgaaaataaaaaacaaaacaacacaacaacatcaaaaccaataccgcaacaattatccttgtacacagttcttatagattgttaaccttattgaattgagtttgtgaactttagttaatggagttttctaaactcgggagtaggattgctgaattaaaggatttaagtcgctttttaaaatatttaaatcagtgttgctgccttgtcttttgaaatgctggagtatcttgcattttattggacatattagtagatccatttcataatggcagaaactgaggttcggtgggtcaccctttagttaagtagaaagtcaggacgggaaccaaaagccctggactgatactcactgggaactgaaaggaagaaacaggtttgggaaacttgtcagaggttgaaagcggagagagcctctagggtctgagggtaaatgtgtctgtggcgtgggtcagggtgacagggtaagggtacgggaaagaaagacgcagtggatctccaacttacgtgtgcatcacagtcacctacaaagcttgtaaagccacagatttcggggttccacttgagtgttttaacaggcctggggcagggcattgaaatgcacatttctgataagtactcaggcgatgctgaggtcgctagaccaggtaacatgctttcagaaccgatgctctggagtgaatttcaggatctggccccttagtcctgagaagaacaaaaagatgtatagtctcaagaagtgtgaccgtctcaagaagaaacaagggatggaatgggagctacagaaatcatagcatgcaccttgtgcttctccacccttcatgatacaacggttcacagtgagacatactcactgatcagtaatcacatcctgtgctgagaacagagtcaattcaggcatacttttctacttgtttcatcacatcggcgctagccagcttttagtgtgtgttagcactatatgttcacaaggttgcgagtgtttagggaaacaagaacaagttgtaagtgattatgttctctcattggagaaaattggatcctgttaagaattcattcttccttctctactaaaaatacaaaaaaattagcccggcgtggtggcgggcgcctgtagtcccagctactctggaggctgaggcaggagaatggcgtgaacccgggaggcggagcttgcagtgagccgagatcgcgccactgcactccagcctgggcgacagagcgagactccgtctcaaaaaaaaaaaaaaaaaaaaaaaaaaaaaaaaaaaaagaattcattcttcctgtaacacaaagaggaatgcagcaaatccagcagatggaggaaagaggaggaaccagaactgatgcacaggactctgtctgtatgccctaagaatgacttactcttctcatcagcacgtggttgccccacgattatcacaaaacttgttcaataacatctgcatctctgttccagaggaactggttactgccacttagcatagcaattagtatattacgcagtttgtatcgattaaatgaacctgctccgtcaagcagaacgagccccccaaaatgcagctaatgtgtttttctcaataaattatgcccctcaccaaaccatacaagatgcatttgtgagaactttaggaaggtattttataaacctcagaaataccgacttttcagacttggtaaatagattacacactgcacaagcacattttttatttttaatgtcttttagaaaatggattatctatgatcatcattcttttttaagggagaccatttggtctgagtcttgtagaaatgcagggaacattttaagattgagttaaaagcatacttaatattcatgaaatattttgaatacttctttctagagactcaaaattatgtttggtttctttgaggactctgctgctctcctttgaatttcccctggttttcattttctagtgtcatttggagaaaaacaaaagggttggggatagtgctgggggcaggacttataaaaccacagtgtatgaagtgggaagatatttcctctttataagattgcgcttagaggagtaatgcacttaacatatccctcagtgcctcatccacagatacagagtccttgaaaccggtgaatagaatactgtgcaagtgagcgaggaagctgtgatttattttgagatgcattaatttcaaaataaagcacttggattaaaagattctattggtaacatgatataaaatataaacagtgcaaaagaacatactctataaaacaagtctctgtcccatcgtcccagacacccagtttacattctctgaagcactttaccagattcctttgaatctttccagaatataaattgtttaatagatataaaacatatttatgaatacattcattcattctacacatataagtacctgttctctgtaaggccttgttccaagaagcaggagtacaacagagaacaagaactagtctttgtcctcaaggagtttactacattgctgtgggtggagaagacaatcaacaatcaatatataaatatatatcaagaactgatagttgctatgaagaagacaacagtgtaagacagagagaatgaccgggaatggtcactctggtaaagtgatacccaggcagacagccattcctaagggccaggtgcttcaggcccaggagcctttaagtgccaaagccctgaggcagtctgtgctttgcgtgtgcatgtgcaaagaggttggtgattctggagcagctgaaatgaggagaagagcatagcaggtgaattctgaaaggaactgtgagtcgggtcctgtcagaccctgtagctatgagctatggattttccttggggagagttgcgtagtcattggagggttttgagaaagggtgatatgctaagtttgctttcgaattgatcaccctggaagctgtttggaaacgactgggggtgcccagagcaagggtacgagcaagaagatgagttaaacgctactgcagtcatctgagtatctaggtgagcatcggggtacggaccaaggtggtggtgatggaggtgagggaaagtggtggatcctgggtatatttttgaagattggaccaataggatttgctgatacataagaagtcttatagagtagaggagatagtcaatctcaagattgtagttgtttctgtgtgtgttttaaccagaacaacatgtagaatggaggaaacctgtactcggaaggggaagaggttgaggggagaggagtatgaggagcgacagttcaggacatgttaaacgggagatgcctaccggtcatccgggtgggagtgggaaatagtctccttaatacacaactctgagatttgggggagagataagggttgctgatttccaactgggaattgtcaggttgtagatagatggtatttaaacccgcctgaatgacaagctgtctctgtgaatctgtttagattaataattcccttccttgtttttacgatcgtttcatatcactgcacaaagatttaccttttctcttcttattggctacagattagtctgttacacaataatgtgaaggtaagacttctctgtgtaagaataaaaatgaaattgccaactcatctacttttttgatatagcagcaacataagcaatttttgagtcagtctaaaatctattgtaatatgcaaattaaaatgaaattctaatattcatttaaaaaccggttatcagaacagtcttcaatatagtaggtcccaggatgaaaattgtggtcagcaggaaaaaaaaatattacagaggagattgggtcagaatttaattttactgtctcatctggtaaattaaacagtggttagggaaatgaacaaacaaagtatgatagagccaaaggatggactaagatccagacattgaaatgatgctgtagaagacagtatttaggaatgttaggatatgttcataatatactaaatgacaaaagaaaatggcatgagaatacgtacgctatccaatttgtgttaaatatacattatgtatgtgccttttaaaaaatattggccctggcaacatggcaaaactccatctctacaaaaaatacaaaaattagccaggcatagtggcacatgcctgtagtcccagctacttgtcggggggctgaggtgggaggataactggagcccaagagactgaggctgcagtgagccatgttttgccactgcactccagcctgggcaacaaagtgagaccctgtcaaaaaaataaagaaagagaagaaaggaaagaaaggaaggaaggaagggagggagagaaggagagagggagggaggcaggcagccagccaggctatctggctgggagaaaatataccaatatgtcaaaagtggtttttatttccttgttttgtttttctgggtaatggatacgggttgatttaaaatctaccttatatgttttcctgtattttatgaacataataaaaaatatagcaaaaggaagaacataatttattacatgttaaaaaatgtgtaataggccaggcgcagtggctcacacctgtaatcccagcactttgggaggccgaggtgggcggatcacaaggtcaagagatcgagaccatcctggccagcatggtgaaaccccgcctgtagtaaaaatacaaaaattagctgggcattgtggcacgtgcctgtagtcccagctactggggaggctgaggcaggagaatcgcttgaacccgggaggcagaggttgcagtgagccaagattgcaccattgcactccagcctggcaacagagcaagactccgtctcaaaaacaaaacaaaacaacaacaacaaaatggtaatgggtaataaatatcacaaaaacatggacccctccccgctttttggtgccaggcaaaatactaccagacccaaagatagagctgtcttggagactgtaaactccctgcaggggtcgtggctgaatgtgagggcttagagcttttttgcttttttcttgttcctgcaatggttccatgcctatagtaacatcttaactcaggcttgttccttggattcattgtacactcactgaaaccaggtgattcaatgtattctctaagcatattatttggtggttttatgtatggctttttgtcgttgttgcctaaaaatattttaaggtttctgccctcaagctagaaaaacagtccaatatcagatatttagatttgaaaagaaaatatgaatgcttctattatgaccttgttcagaaattcttgttaaagacagtatcatgatatagagctaattctaaatattggcaataaccatggaactccacaataaattatgcgtggcctaagaattagctgcaaagcgagaactattttctctcttttttactgaccagatattgaggactaagggagattaaataatgagcctagggtcatgcagctattagtggcagattctagactttaactcagattttgtgactttcacgtgggctcttaccaccgtggaaaatttcccagaatgattgttctaaaggtaataaatagcacaggacagtaattctcaaagcatggttcctaaatcattaagatcaaaaccatctgggaacttgttacaaaatacaaattcctggccgggagcagtggctcacacctggaatcccagcactttgggaggccaaggcgggtggagcacctgaggtcaggagtttgagaccagcctggccaacatggtaaaacctcatctccactaaaaatacagaaattagccaggcgtggtggtgcgtccctgtaatcccagcttctcctgaggcaggagaatcgcttgaacccgggaggtagaggttgcagtgagctgagatcgcgccattgcactgcagcctgggtgacaagagcaaaactccatctcaaaaacaaaacaaaacaaaacaaaaaacaaaaaaaacaaatgcctgggctccacccttggaaattctaggagtggggccaggaatctgcatttgaacaaaccctccaggtaatgcttctgcttgccgttggatagctgaactgctgacccagggcccagaaagcatagggagatcatgttttcaaatattattttcacaagagaataagtaggcagaacccaaagatattgttcaggaagccacctggagaatggcagtgaatgtggagggtagtgtagatgagagccgagatttcagcagaatgagaaaagcaggtattcagaggctggcttcacttggaatgtggttttattctttctctcttggactgagatgtcccttctgactcaactttgcccatgttttgtgcttgaaatattgatagaaaattagttgggttacatatatgaaacggaagatatgattagaattggaagtttctcaggttgagaatgtgttcaggcgtggatgtggcttctgactcagctgaatcttatcaagacagtgtctttattcagtcgctttagggcccaggttgaatgaaaggaaaattacaatacgatttgcatatgcagagttgttattggcaaagaccccacttgagttattaatactttaaggagcaacctgatgaaaatttaagagcttgatgaggatggaattaggtattgaggtactgatctttttgccatagtgaagatttgtgctcgtttctgaatgaatccagactgatgtcacaaagacggcatatggtactcatgattgactgtcgcagaaaacaattacatcctgtcgtgctgttcaattttgcaaaacacaatgctctaccataaaaacagttggattccagagaaggacaatatggtgcagtattgaggctaagacctgccactgctctgcactcctggtctcagactcatgaaagaagtgcaccagcagcaagtcagtgtcagcgaaaccaaatgaggaactgggaaaccagaaatgcatttggcaggtatggcagacagttgtttttcttttctcagtgacaagctatgcgcagtggtccggtcattagaatctttttctctcccaagagggctgatagaattttctcaccattatgaggaaagggccttggcaatcagcccttcactcactgtgagtattgggaagtttttacaaggcttttactgtgctgttaatgacaataatgacggcagggtgggggcgggggcaggggaccatgcttcagccagttgtcggtcaggtcttcattcaatgttactttttctggggctgcttgaccagaagtagccactcaactaattcatcatatcatgcttttttttttttttttttttttgagatggagtctccctctgtcacccaggctggagtgcagtggtgcgatctcggctcactacaagctctgcctcccgagttcacgccattctcttgcctcagcctcctgagtagctgggactacaggcgcccgccaccatgcccggctaattttttgtatttttagtagagatgaggtttcaccgtgttagccaggatggtctcgatctcctgacctcgtgatcctcctgcctcggcctcccaaagtgccgggattaatatcatgcttttaaaataatcttcagggcatatactactatctgcttttttttttttggtaacaggtttattgagatatgaacataccacacgtaccataccatatacatgtaccctttcaaactgtacaatttaatggttttaatgtagtcaggtttgtgaaactatcacaattgattccaaaacattttcatcaccctaagaagaaaccccacctcctttagctatcacccctggataccaaaaataaaattctaagctcttcagccaactggaagaactcctgttctctgctaaggacattcaaaagttaacctgaaaaaccagttcagcccatgatgggaagtgggggtcagacatgcctcatgataccctcctccctttggagttcaggcaaaactgaccagcattaacattaaaacagagacctcaagactgacaaaacagactctttgtaggagtaagatactaacatgagagatagcaggccctgaaagacatttaagtattttactccaaaatatattatttgacatattttgaaatgaccctgcaaagctgtctcttgtggggaaaatctgtattctgtagagaatcttcttcccttttcaggtgttttctctgatccaggagagaattaactaagagtctggtgcccttttaattctgataggatatatttaccatctcttctctctgaagcctggcacctgaaggcttcatctgcatcataaaaaccttggtctccacaaccccttaccttaactcagatactcctttctgttaattccaggcctttcgataaattccttcaaccaattgccaatcagaaaatttttgaatctacctatgacctggaagcccccatttggagttgtctcacctatctggatcaaaccaatgttcatcttatatgtattgattgatgtcttatgtctccctaaaacatataaaaccaagctgtagcccaaccaccttgggcagatgttctcaggatcttgtggggctttgtcaatgggctatggtcactcatatttagctcagaataaatcttctcaaatatttttgacagtaccctctaggcctcagcaaccactgatctatgttctctctagggatttgtttatttgggacattttatgtaaatggaatatcttagtttatttttacggctataacagaataccaaagactgggtaatttataatgaacagaaatttacttcttatagttctagaggctgggaagtccaagatcaaggtgctggcatcttggaaaaggccttcctgttgtgtcataacatggtggaaagtatcaagtggtgaaagagcagagagggccggaagagagaccaagaggggatgaacctactcctgcaataatacacctgaaaccgcctttgaaaaattatgacagtaaaagaaatctgacatggctgactccatcttgattctagcctcacaggctggctgccttcatttattcctgggcatgggccaagctaactttaagagaaatttagtttatagtttaaatgataatagcccttccctgaaactaaactgcccttgtaaaattaatgaaaggccaagttaggaggatgagaggggcctcagttcttctaagatttagatgtagtttaaaaatgaccggacattatactggaggccacaagatttgcaacttccccaattattcctgcaaataatatcactattgcagaacctgagattggccttttgagatggctgttcagatttttgcatttctgacaaccagatggccccactagacctgtaactcaactagtcctgtggtcccacccagaagtgggctcagcatatgaggaccattttccacacccttatgattgcatttccaaccaatcagcagcccccatcccctaaccccttgcctgccaaactgtctttaaaaaactcctgacctctgagccttcggtgagattgatttgactaataactccatttcccacgtggtgtgtctgacctcacatcaattaagctctttctttactgcaatgccatgatctccatgaattgattttatttgtgcaatgggcaggaataactcattagatggttacaaacgaactcccaagataatggcagcccctttgaaaggtttcgcctcccaaaacagtcacgagacaattaaatttcaacaggacttttgggggggacaaacattcaaaccatagcatggaataacataatccctggactttcatgactagcacattgttttcagaatcatacatgttgtagcacatatcagaacttcattcttctttttatagcaatctgaatatttttgttaatttgtatacagtttcatcacaggtctcttagttccatgagaaaagagacctgtaagcccaagcaactcccatgaagcaaagcgtcttctgcttctacattgtaacatgggtctcgtactgcatggttagcttctctccccagcagcatgatgctttttgtgcattcagaacccaattgatgacataagtcgattgattgctttaagtattttatgccaccaggcagcatcttgactcacttaggccaggttaggaagagacctgcatgcattcatgctgtttagagggaaagttcaagtgttgaagtacaagaaggcatttgtttgactttcacaaaggcttgtctttctactcttgtgggatcttgagctaacactgctaatagaattaataaatgttcagtgctaaactcccctgctgttggatagtcctaaatgattgtgcatatacacataagaaagatctttccccaaggtcctgcttctgctcatcacttgaatggcaaagtcgagtgaagtagtcttattgccacgttccccacagtcagtcacagccatgttaatttaaccgggacctaaagtttcagcatgaattcagccttgggctaacagtgcttctaatttgatagcttggttaggatttatttttgaagacaattttctgctacttaggcaaatcctgggttcattcattcattcattcattcatcacacatttgttaagcctctgaaggctctagctaggtgctgggaataggatacagagataaaagataatccctactttggccgggcgcggtggctcacgcctgtaatcccagcactttgggaggccaaggcgggcagatcacaaggtcaggagatcaagaccatcgtggctaacacggtgaaaccccgtctctactaaaaatacaaataatcagccaggcgtggtggcgggcacctgtagtcccagtgacttgggaggctgaggcaggagaatggtgtgaacccgggaggcggagcttgcagtgagccgagatcatgtcactgcattccagcctgggtgacagagcgagactctgtctcgaaaaaaaaaaaaaaagataatccctacttttcagcagttcatggtctagagcagaaggaaggctaggttagtgactatcacaaaacagtgaaatgatgagatatctggtagaagcacctgatcctattaagggaggagaagagacatcaggagagtatctaaaggaggtgattcctgagctgactcctgaagggaaggtagaatttaaccacataagtaatggggagaacctttgggcttaggagcagatgtgcaatggatttccaggctcttggaaatgcctgggctgaatggtgtggtttaggctatgttgaggcctgagaagggaagggtgtcaagatcagagccccccaatctaagaagtttggccgttagcatgaggatatatagtcccttgaccggttaactcaggagactaggctggatgtcccccatggttcttccaactctaacgttccatgattcttttaagtttttctgacataggaaacaaaatgggttatttgtaatttttgtggttgttttttatagagtccagggacatgattttagtaggttatacggggtcaggagtatgggtcacgtgtagtatacagtttgttccaccataacaccatttcttttcttttctttttttttttttttttttgagactgagtctcgctcttttgcccaggctggagcgcagtggcatgatctcagctcgctgccaccatgcctggctaacttttgtatttttagtagagacggagtttcaaccatgttggccaggctggttttgaactcctgacctcatgatccatccacctcagcctcccaaagtgctaggattacaggcaggagccactgcgcccagccacaccacttctatattgccactgagctcagatgtatttgaaaaattggaaattcactacaatattaaggttgtgttggttcctaagcaattttttctaagaaagggaagcccagattagaaggagtgaaattgtaaccttaagctggataggaaaaggtacttacagactggtgcacaggcatggcctcttccagaagatgaaccatgagcacaagtccctggactccctccctataaaggggtgtgcccagcctttgcagtcttgctcagctcctgttcatgtggctgcacagccaccattgccagctttctgcaatagccccttctctacctctgtcacctggacttcctcaagctggcacttccaatcaagtgttttctacattttttataaccccaaatcaacctccagtctagctgggctgtgcaaactatcccccaaagtaacaatgactctggttgtaaataggcatacatttgaatggccaacccaccccctgaattttcccacaattttgtgaatgggaggtttttcaagaacttctgtgtcaccttacaggggaaatccccatactttacaattctatggctcagggtaatttttatttttacttgttaatgtgaagatattatatctattgtaaaaaaaaaactatataaaaatatattttttaagtaggaagactgtaatccttctctccaaatacactaaatcctcatttaatgttgttgatagattctgtggctttagcagaaggacatacagcaaaaccaattttcccgtaggctgattgaaataaagaagagttaaattcctatggcatatttctggttacaaaaacattaccaaacttctagataaagacaaaaacacttctaatattacacattgaaataaatgtgagctatacgtacatttgagaaaagattaatcaaaacaagacgattatttacccagtggttccagttcagggtcacgggtggccagagcccaccatctctgcagctctgggtgccaaatgggacccagcctggacaggatgccctcccgtctcaggacacactcacccatacccacacccactgagacagggaccatttagacacaccagtgaagccaacaggcagttttgggatatgaaaggaaagcggaggacccagagaaaacacaagcaggcatggggagaacgtgccaaatcgacacagacagtgaccctgccaggaacagatttctatattcacattgaagttgtaatgaaacaaagctgaatgcattgacgttatttgaggacctgcggcgctccaggtaacccaatttcaactcttccaaacatgagtgctaactgctatttccaccagggcggtacatcagtgccacttgtggccctccactggtggttgatatcaaggatagagggactcagggcgtcacagaagagggagcggaaacctgcctactggattctcaccaaatgacttcctgcgtcttttctccctgacacaattatgcagacatttctgcattgttataaggcttttctttttgtccaaagacaattaaaatgcttctttcataaaattagatgtttttccaaagggttgagaaagaactagagagcccggctttgtaccgttctcctcttcaaaacgcggcgttgctgtcatttcactcttgatcccaaatcagctttctgaaaatacagtcaaatcatgctgggctgcctaaatatatttgcagtgaagtagtgaataatttgaagtgactagtattccacaaatgttttctttatatgaaattttctgttaaattaaatagaatctctttatatcaagaaaatcaaataacccctacctctaaattgagttcttttccttcttttattttttgaattccatgcaaatgaaatagaatgttactaaaagtcactggtaaatcgttctggatttttttagactttcatgtatacagaaataaccactatgagaagctgacgaggtgagggatatgttaattagctcaaatgaatttttttatagtatgtacatagatcaaaacatcacattgtactctataaatatgcatacttattatttgtccattaaaaatacattttaaaaattaaaaacaagaaacagctgcagaacttttctactagcttagtacttagcttttggaccttttcatctaaaagtttatttttaggaaaagttatcctcatggaatctaatcctgtgtgattccacttgggggcatgttttggtaattgtggaattatgatagggacagggaattcgattcagcaaatgtaaattcaatgcatacaaattaaattttcttttgagtgaatattataatctttttttcaagttgaatctcatgaactacaatgagttttggtcttcaacatatgaagcctcctattattttggctttactgagtgaattatgcctgaaactaccatgctgaggggatgtgtacagtggagacttttttttctttaagagattggaaatttttaaaaaaaaaatcctaacatgggcattgcaatttctaattatcatcatcatcatcatcatcatcatcatcatcatcatcatctccatctccatttttcccctttacctatttgttactaggtaagtccaagtaggtatcatctcatcaaactcttatactttccaaatggataggtgtataatttcgacaattttcatatgagcaactaaaatgacattgcactaggtctgtaaccccctgtgtctccttcgtggtacgacatataaatgtttcatttccaattcatgtaaatcttccatctttgccaagtattacattgtgcctatgtgtagttaactgggccttgaatgggaggatacttaaatagccgtcagctctcgccaatgtgaaattacctcccaatgaacatcttgcataaatctttgtgggtgaatttttttaaagatgggaatggattatttgatattcaagcatccaggaaattcaactttgcaaatagtcacttcttacacaatggcataatcaacctgcgtcatgattgtgtctaagaccagggctcagatacgggggtgcctggaggtctgcttccacttgcacccccattcttcttgcatgcgttgaccccgttcacctttccttttattctacccatcctacaggctcttttctctctgaaactttccttcttttgtataattctttccccgatgtggttggtcaggctgttgactgctctctgataatctgggggactagaactgtgtctttagagttgcctgctgccaaaagccatttcatcttttttcctccctcaatgtctggaacaatgatttgtcgacaatacttgttcaaacagacttttattttttctttctgatgccagaacacccaacacaagtcagtttaaactgacaagaattaggctgggtgtggtggctgacacctgtaatcctaacattctgggaggccgaggtgggtggatcacctgaggtcaggagttcgaaatcagcctggccaacatggagaaaccccatctctactaaaaatacaaaaaaaaaaaaaaaaaaagaaaaattagccgggcgtggtggcatgtacctgtacttccagctactcaggaggctgaggcaggagaattgcttgagcccagaggcggaggttgcagtgagctgtgatcgtgctaccacactccagccttgctgacagagcaagactccatctgaaaaaaaacaaaaacaaaacaaaacagaaaaaccccaaactgaaaagaatgaaatggctaatacaattgaaaagtctggggccagcctctggattcagtgggatccaaggtctcagtggagtgtgtgaagatctctctgcttttcttggctgtcttcttctgaatggtgtctactcactgtcacgtggtccctttgtagttccaagataggctccagtcccatctccagcctcttaacaactccacgagaaatcattcaacacatgttacttgtatatctattacatgcaaggcaatattctgcactctggggatagatcaatgaacaaaacagtcataaatctttagcttacttctgctgattctctcttccacaaaaatgctaacaatgtctcagtaaattatttcggagtggtctggcatgggtcaccagcccaaccctaaagtgaatgggggaatcagccccaccgggactagagggacttagctgggttggagggaagttccccaaaggaacgtcatcaaggcactgttgccagcagggtaaagaatggatggtgctaagtaagcaaaaacagtagctggccaccatgcccaccaccttcaatcgatgttcattgatttgcagcctggccagctctgtggttcttttactccatgctctcctgtttcctcagtcaggccactttcggccccagtgttgctgacgcacaactttcttccctttggctgcagctccagatgaagatgagtgagcgggccgcctcgctgagcaccatggtgcccctgcctcgcagcgcctactggcagcacatcacacggcagcacagcacgggacagctctaccgcttgcaaggtaagcgtggggctacctgtgtccagggtgtgggccaggcctgggagtactggggagggggctcagctcaactcgcagctgctgcatgccagctggttagtgcccttcctccaaaggtaggacccccatcaaggcctcacacacgaggcacttaatctttgtagagccaaatatctgtatggctctagagatatttgtatctatcacagtgtccggggggaagtcacttaaaatgaagattcttgggtttcatccccagagactctagatcttaaggcataggatgtggctgagcaatctgcacttttaacagaccgtacacagggtctgggcgaggggccagggaccaggctacaagaaatgatgtagtggactgatgaatcacagcatcagcattacttgaagtcttgctagaaatgcaaatttccatgcccttccccagacctactgaatcaggagctctgagggtggggccaggccacctgtatttgaacaagtcctccaggtgattctcccgagagctcaggtctaggagccaatgttttggtggatggggccctggactgaggccagaagccatggcttcaggtttgctgaatgactttaggcaaatcctagtaagctcttcttctagagaagtggtctctgaagcatgatgcagaacagcccatagtgtggacaacatgaacaatgaaaaaatctgcttaaaatggccaggcgtggtggctcacgcctgtaatatcagcactttgggaggccaaggcggtcagatcacctgaagtcaggagttgaaggccagcctggccaacatggtgaaaccctgtctttactaaaaaaaatacaaggccgggcgcagtggctcacgcctgtaatcccagcactttgggaggccgaggcgggcggatcatgaggtcaggagatcgagaccatcctggctaacacagtgaaaccccgtctctactaaaaaacacaaaaaaattagccgggcgtggtggcgggcgcctgtagtcccagctacgcgggaggctgaggcaggagaatggcgtgaacccgggaggcggagcttgcagtgagccgagatagcgccactgcactccagcctgggtgacagagagagactccgtctcaaaaaaaaaaaaaaaaaaacaaaatttagctgggcgtggtggcatgtgcctgtaatcccagctgagtcaggggaatcacctgaacctgggaggcggtggttgcagtgagccagaattgcaccattgcactccagcctgggcaacaagagcaaaactccatctcaaaaaaaaaaaattctatttaaacctatcctttcaaacatatttgttttgttttgtttttcatttcatagtacataagaatagcttattatgttatgcgcctttgtgggggatacttgtaaaaaaactcttttttttttttttttttttttttttttgagacagagtctcgctctgtcgcccaggctggactgcagtggcgcgatctcggctcactgcaagttccgcgcaaaaaaactctttaatgatgaggtacaagaccaccaaactggaaatagagtgcactggactacacgtagtttacgtgcagaaatttgctgaataattgaatgcaagaatgaatgaatgaccatggaagactatggccttagtcctccatgctcgctctgaaccctcagtcctccatgcccgctctgaaccctcagtcctccatgcccgctctgaaccctcagtcctccatgcccgctctgaaccctcagtcctccatgcccgctctgaaccctcagtcctccatgcccgctctgaaccctcagtcctccatgcccgctctgaaccctcagtcctccatgcccgctctgaaccctggtcacaacagcatttttttctcagtctttgctgttggtcctttctcccccaggcagcttttcctgtatgctgcgcccgtccctcatcctagttaactcctgctcacctccaggtctcacctccagcgcccctcaggctccaagaaagccctcaggactttcttgtaactggagtggacatctctgatgacgtgcactcataagatgcagatgatggccggttttcatttcatatttatgtggccaattgactcatggtcagctctcccaggaagcaataatgtacaggagggcaggagagctgtgcctccttctatctttatcattttatcccccggcaccttgtatgccttccatcaggatttgtcgaaagaatgcataatgttaagaaagcactgggggtatttacattttagttttcatgactctgtgctctgttcactagcagagagcatggcacatagcagatgctgcaaaaaaaaaaaaaaaaaaaaaaaaaaaaaaagatactgagtgcctctgtgagcagctgagcaaacgactgaattaataattgacaaataagcttaccttccaagatttctctgcagagagagtgagttagattgggttgtcacaatgccactgattctcacttaaacttcaaaaatgtttgcaatatttgagttatatcatcacaatttttgtcatatacataccagaatgttactcgattttactctcttctattttaatatacttctttaaaaaaagcatattttactaccttaatactgttatatccactggttatactgttttttttttttttttttttttttgagacagggtctggctcttcgcctaggctggagtgcagtggtgcgatcatggctcactgcagtctcaacctcctgggcaccagtgatcctcctgccttagcctaccaaatagctgggactacaggtgtgtgccaccaagcccagctaatttattatttttagtagagagggtgtcttactatgttgcccagactggtctcaaacttctgagctcaagtagtcctcctgcctcggcctcccaaagtgctggaattatagatatcagccactgcacccagctagttatgctttttaatagacaataaaataaataataagtattgaagatttaaaagatgttcacagagtacctaaaattatcttgcttatcaaaagtggctatttaaacaagtacatttaaaaaaaaagttttattcttctacctatactacctaccttccctctcccctacttttcataccccttagaaaaaggaaataggattgggaaaagttaatgacttgggggcctggggtgtgccatatgatgaagttacagagcctttaatttcttcttgttttgctgatgattatgggttgtaattcctctggccaattcacctacattgatgaatttcaggctttttttttttttttctggcaaatctggaggttaaggttggaaatcatacagacccttaaggaggaatttaacaaattggtttgagaataatggtcattttcttcaaatgtagtcttcgagagccccctgctggttgatttgggaattatcattttactacagtttttggtggggaaagggaggtggctggttttgacacgtgccacacaagacatacctaatctaccttcactgcttctcccacgtcgttttaaaattttcatagaaattctcttctatgattatgcagatacaaaatcaacattggaagtaggtttataatgaaaactgtctgggcgtggtggctcacacctgtaatcacagcactttgggaggccgagttgggtggatctcctgagatctcgagttcaagacaagcttggccaacatggtgaaaccccacctctactaaaaatacaaaaattagctgggcatggtggcgggcgcctgtaattccagctactcggaaagctgaggtgggagaatcgcttgaacccaggaggcagaggttgcagtgagccatgatcatgccactgcactcctgcctgggcaacaagagtgaaactctgtctcagttaaaaaaaaaaaaaacaaaaaaactatggaagaaacttacagaagcaatcaacaagtttatgttgaatactattcactggattcttttaggaatgcattggataaaataacagcagttacatcagtagcatttcccaaattatgttccttggaaagctaactctggtagacagcacctttcccctaagaaaggttactgtggtcaaacgcgtctgggggaaatgctacatgttaagttctcatggagagtcagaaaacaaatcaataatttcagggctctgagatgccctgcaatgaaaaacctgattaaacttgtttaaaccaaagctctgcacatctatttggacatgaaacttcttttccttcttgttatatgaataagcattcacgtgccaccagtgcagtgctgaaatctcagatttcatcattacgagggagacaagccatattcaatggggtctttctaaaagctactctttctgaggacctactgtgtaccagctttccgctgggacctaacatacatgatctcatttagatcccaaaacagctgcccgaaagggtattttattctcatttgctgttaggaaactgagaatttgaagggttattaatgggtccaagactacctatctagtaagtaacaaagattttaaggtttttctctctcattcttccatccatccattctttgtttactcagtaaacgtttattgagcatctagtttaggccaagcgctgtgctagatgacagacatacctgggactcctaggcagggatattccttccctctcggagcttataatctaatggagagtcacaatccataatcaagcagacatagttaatttcagatttggtatatggaacagtggaaaagaaagtttttatgataaagaaagtgaggcagagctgttggttttgagaagatgctgacaaagggacttcttgagatggggtagtcagtggaagcccctgcaacaccccaagaccttaagtctaaaagaggcagccataccgagagccaggggaaggcattctccatagagaggtcagcaaatgcaaaggccctgagtcagaaatgagctgcgggcattcaaagatcaggaaggagccagtgtggctggtgcctaagggacataaagagacagccggggtggtgaatacaggtaatcaagacttgcttattctaagtgtgaggggaagcattagagggtcctcagcatggcagtgtcagatttaatcgatattttcattcaagggattgcaagagaacaggagaggaagtgggagactagccccaaggccgttgcacatgagcaccggagtgtctggcctcagtacaatgttcctctaactctctcacctccttctcaaagttatcatctcagcaatctttacccttaggccaaggtgcttcattgctccagtgttttccgaactcttctgtgggaattgccttggaagatagcatcactgtttcaaaacaaaaacaagaaaaactaggcacctatatcatagatcggacctaagataatttgaggaaatcaaagagtggcactaaacagttgtgtcactgaaccaggcgtcttccatgtagccttatggggttctcctgacaaccatgggagttggtgagagtgggactatggtctccatttcaatgactgaagaaacagagacctttggaggttaaggtcttactccaggccacatggctggtggatgtaggcgagaccccctccctacaaaaaatccaagaattagtcacgtgtggtggcacacacctgtggtcccagttacttgggaggctgaggtgggaggatcacctgagctcaagaggttgaggctgcagtgagctgagatcacgccactgcactgcagccggggcgaaaaaaaatacatacaaataaaataaaataaaataaaaacaacattgttttgaatgtgtgtgggtggggcggacatgctccactggctgcaatcctgtttcttgtgcctgcttgatccacacatttactcaccaaggctgcggaagtttgttccaaaggctttgcggtgagtcctgagatcttcacctagccgtgtacatttctttgcttgcggtaaccgttggccagcaggtggcagtagaacctctagtttttgttaaatcagggacgcattatctacagggattggcaaacaatggcttgtgagccagatccagcctgctgactattttcattaataaagcattattaggacgacattcattacatattaactgtggctgcttttgtgctacaggcagcagggctcagtagtcgcaatgagaccatatggtctgcaaaacctaaaatatttagtgtctggctctttctagaaaatgcttgacaacccttatattattaatatgtcacaaagggggctaatagggatcttgtgtgttgccttcttgactttttaaactctgtttggtctgaaatctaaacctgaaataataaaggctaaatgaattttaggaagttctccttaacatttacaagattaccaaagtataagcataagactgccttattgctgctcaggtttccagaatattctagctaaaagtttccatagttctgtttctatctcatttctcctgaataccctggatatggggattgatgcagatgaaaaattaaggaagaaaataattgctaatggactgaccatggctcagcccaaaggccacatgcaaatgatacgtaaatcatgcaatctctgtgactcatttacatatcatcctgagaggcctttggaaaaaattctgccttaagtacatttacttatttctgttatagagaaagttgttgccacctaatttgattgtgggctttcttgaaatgtaactgttgattttaaattctttttggaaaagatgtttccagccctctgaagcttcatcgaacagagacttttccagcctacagatctgagcactgacagtaactgccaagaattgttaacacacttgtgatgtgtcagccacagattcacccaggaggtcacagaatgacagcaagggaaatgacgaccaagagaagaagcttaaagtcctggctaattgtgtggtcattggaaaactctgcaatacaataattttctttattttctttttcttttttaaattcttagtgtaattgaaacgtgctctatagatattgactctgtgttccctcttttacagctggacagaaagaagtcaatgtcacgaaatgattttctattgtagatactttgtcccttgcacttctctgaatctgtccttttgtggattcttgtgattttccttccaagtgtttcagttgtatgacagtcagtattgacaataaaatggcttttaattatttgtta

SEQ ID NO: 15569 - DNA, 66608 bp, Homo sapiens; identical to SEQ ID NO: 1176

SEQ ID NO: 15570 - DNA, 65313 bp, Homo sapiens
gggtgcggactgtgggagctgactctgggtagccggctgcgcgtggctggggaggcgaggccggacgcacctctgtttgggggtcctcaggtaagcgatccatccagggtaggggcacgggagtggacctctccgccggcggtgtccgggtgaaggagacccggagcctcctctgcctgctgcgggccggggactggagtgcgggctgcaccacctctttcctagagccttaaattctttttgcagccttgccacctgctccatcgggggcgctgggaggcgcgacagcccagggatgcctgctgcccctccagccggacttaacccagcctcttgattgcttgcagggggttgataataacgctgaaagcgagagtattaattcacgatggaaggcggcggttaatagaggctcgggtgctgtggtgcgggtcctttctcgcgtgtgagactttttcgtggaggtggtgtcctctgtgcttctccatctaacgtggtgttttacgtggctttctctcccgttaacgatgatctccgtggagacagtggctgagtaatcttcagatcccagtacttagcaagtgctcagtcggtgttggatgtaggccacaaaccggatcgtaaagaattcaactgtatattgacagccacggaactaatcaatgaatagatccgtatgaagagtaagcaaaaaggcagcaaagacagtttttcagcttggggacatagagtagaaatggtctgtccccaaatagtgggaactgtcatttgggggaagaatagcaagttctttgctttccaggtcgcatttgatgtgcatgtgagacatgcttgtgattctatcaggaggttgaaaatgtgggtttagtggtaagtttgggctaattcagtcagggctaggcatttaggcctaatcagcgtattggtgatctacctggtatatgtaatcatgcatgtgatgtctagccaagaggtggatagtcgaaggagcaagggaagaaaatgaagcagttatcaggaaattaagagagaatccacgattgacctttggtgtggagggatctttagcacatttaagaactgcgaagagtttgaatcagtggaggcaggaaggttggaggttgcagatgtccaagaaagagtactaataggcctaggtcctgtggcaatatggaggatattcctttcctagcctggaaagaagtggagggaagtcttcctccgagaagataagggaataaggctgatgggtgtgaaatttcagagaaactagttttgaggcgtttttatgatgtttaaagatgaaaaacgcagccaggcacggtggctcaggcctgtaatcccagcactttgggaggcagaggcgggtggatcacttgaggttaggagttcaagaacagcctggccaacatggtgaaaccctgtctctactaaaaatacaaaaattaactgggcatggtgccgggcgcctgtaatcccagctactccggaggctgaggcaggagaatcgcttgaacccgggaggcagatgttgcggtgagccgagatcgcgccattgcaccccagcctgggcaataagagcgaaactccgtctcaaaaaacaaaaaaacctgcatgatatgttagaggttcaagtaatttctagcagttcttgaatataattgtcaccaaaacttactaaaatcattgtcttcctcacttccatcatatataaacttacctttctcttatcccacattatatattatataattcctatgacacttgacattatcttctgtgtactattaggattgattcatctttattctttctatgtcatacatatgtggggtgccaagatgagagaagtctccttggattaaagtgacaataagaccggtgtggtccttgtaattgctacccctaacataagttagggacttacaatcataagccttaaagggatctgaatataaataactagcacagtaacatttttttcccctacttaggtaatgttatgcatttaagcaagcctgattttgccagaccaaagtagatgtcttgtttagcactcttttctcacgttttatattgtcctgggaaaagcctggccagaagaacaaagttactggaagtagttatgtcaggtcatcagggtccttgaaatgttggtcatcattttgaagtaaattgttgtcatgtcccagtattttctcttcccctttagaacagtaaatgcttttctatctttgatttcagtttttttatgaatgtataaaaccagtttataaatgaatagacctggtgaatattaaagtcatttcagattctcttcaactgccagtatataaaaatggattttcaaatagtgctaatcagtgggatacccttttgtttttcctcatgattttataaagatgtcctaatatgcaaaaataaaatgtttccccattcatttgttctttcaactttcccaaaggaataactgatattacatcttttttgaagaaaacattctaaagttgagaatcttgcctctcctaaaaagaacataaaataggtttcagaattcctaatttgtagaccataactgtatagagtgggtcaggttgctgctataatccatacatgggtgtgtactcagagaggtaagttttttcttttcttggttattctgattctgactaccacttcttcaccccctgaatcatttcatttaaataaatatggtcatttatcactattaagctatttatttttctcttagagattaatgattcatcaagggatagttgtacttgtctcgtgggaatcacttcatcatgcgaaatctgaaattatttcggaccctggagttcagggatattcaaggtccagggaatcctcagtgcttctctctccgaactgaacaggggacggtgctcattggttcagaacatggcctgatagaagtagaccctgtctcaagagaagtaagttactgatgtagaatgccagcatgtgggtatgacccttgatttctcttcttccaaatttctttccccacatggtctttctttatatcttattgaatttatatcctcccaaataaacatcttttgcttcatatatatgccatgttagacatagcttaaatcgtaatccttctttaactctgctgctattttaacctaagtcagtagaactctgaccttactttttgagtgtgtgccgtactttttaccctctttgtcatgcaaattctgtttataagagtggttttttttttttttttttttgagacggagtctcgctctgtcacccaggctggagtgcagtggtgtgatcgtggctcactgcaagctccgcctccccgggttcacaccattctcctgcctcagcctcccgagaagctgggactacaggcgcccgccaccgcgcccggctaattttttgtatttttagtagatgtgcggtttcaccgtgttagccaggatggtcttgatctcctgacctcgtgatccgcctgcctcagcgcccggccaagagtggtttttaattgggaatgaacacgaaagttgcccatggagctttctaaaagtttgagcccacatctcatgtcaactaaatcagaatctttagtgttggctcctaactatatgtactttaaaaacctctgtgggttggttttgatatggtcccttgattatgttcttctactaatacattttaggcagttacatcctttagtgccttttccccatactatagaaatcttagaaaagcatagctattagcatcatattttagtggacaattttaaagagaccaggcttattgtttttgtttttgtgtttgtttggcaaaaaggtcacattacctatttttcttgttagagatgacagagtagtgatatttctcaaatgaaagtttggattttcatctagaaaaaatatttttgaaagcttttatgtaataaaagaagcattaaaaagtatttctggaaatgttatcaattattcttgaaagtagactgggttaatttgcttgtgtttactttggtgaaaggtgaaaaatgaagtttctttggtggcagaaggctttctcccagaggatggaagtggccgcattgttggtgttcaggacttgctggatcaggagtctgtgtgtgtggccacagcctctggagacgtcatactctgcagtctcagcacacaacaggtaagtggaagactccagtgaggggggagtctcaagcatcctcaaataggttacttgctatttgtggaagttttcaaatcagtagccataatagttacacttttgctaattaatttttgcattatatatttctttatttaaaaaattgttaacatggctttatctatatgttaagattcttctaaaactgagttttgtctgctgcatctattaatcagagtgatcagaatgttccaaatgagaatatatttttttaaaagttaaaactggctattcttatgtggtgtagatcacctcttatcagaccctcatcttgagttgcaacctttgtttctcaatttaggaagtctttgtttatctgacttagattttctgttatgaatgttgattggctaaatttagagtccctgaagtctaggcactaaagtaaatacattgtcattacctgcacatgtgatgactgccagtagagctagacttcaagcaattgcttctttctctactttagtgtatagttgagtttctgatttctatcctcaccttcttaacagcaagggtttcaaattacacttggctgattctttaaatcttcttccattacttcattagttgtgatctccttaacattgattatgtcacagaagttagagtattactaatagtaggataatgatagcagcttacatttattaactatcatgtgcctggcactttttaaagtgcttttcatgcaaatttatttaatcttcaccatgaccttatgcagtaggttgttgtttcctattcttcagaagaggcagttaaggcacagagtgcttaagtaattagaccagggtcacacagtaatcaaatggggtttgaccctagcagtctaaatctggcacctctgctcttaaccattccatttagtacaatcataaacctttacttgcagttcatggtgggaaatatcaaacttgtcatatacagcttgtttttttttcgtatttgaaagatagatgcttttactttccaaacattttgtagcattgtttcctggttactgagctcttccagtctatttatcttcatttaatggtgctgattctgccctttagtggcttctcaattgtctgaaaggtagagcccactattgtgccttataagcccctttcactatctgttccccacattcctttttagcctcatccccccattgttcctgtgtgtacgtaaaccttatgttttagttgcagctgatttttaactgctcttttttctggctttgtgcctctacactgtgttttcttcctggtctctctttcctgtccttattaccactctttgaaacacgtcagaaaaactttttctggactttgggccacttgtcattccctgtgctgagacgcattttgctttccagagatcttggtcattgctgttatcctctgtagggtcttcttttatctccctcgtgagacagctctgggaagaaaaagatatttatttctaatccctgtgcctaataacaggtctattctcttgatatccattactgaagaaatgtttgttgagtaagttcttgttttaatttttaaatataaatttttaatttttatgagtacatagtaggtacatatatttatgggctacatgagatgttctgatacaggcatgcagtgcaaaataaccacatcatggagaataggatatccatcccatcaagcgtttatcctttgtgttacaaacaatccaattacagtcttttagttattttaaaatgtgcaattactgttgactgtagttaccttgttgtgctatcaaatagcaggtcttatttattctatttttttttgtacctattaaccatcccaacttccctcagcccctcactacccttcccagcctctggtaaccatccttgtactctctgtgtccgtgagttcaattgttttgatttttagatcgcacaaataagtgagaacatgtgatgtttgtctttttgtgtctggtttatttcacttaatgtaatcatctccagttccatctatgttgttgcagatgacaggatcttattctttttttatggctgaatagtactccattgtgtatagtaccacaatttctttatccagtcatccattgatggacacttaggttgcttccaaatcttagctattgtgaacagagctgcaacaaacatgagagtgcagatatctcttccatatactgatgtcttttcgttttgtttttttaattgttttgattgaagttgcagtcagtttttactgagatgctagtgtttgaatctctcttttcaattttctctgtctcagctggagtgtgttgggagtgtagccagtggtatctctgttatgagttggagtcctgaccaagagctggtgcttcttgccacaggtaagcttgttactggtgcctcactggcttttttaaaacattattccagatgtcttacaggcttcatcagctttaggctgcttgaatttcaaaaaatttctttgaaccagtataataccaattatgaaccagtataataccaattatgtatgtgtgtgtgtatatatatataaaacgtagagtgatttttttttggtgactgaagttttgcctcttagtctatcattataaaaagttgtttcatgtaactttttaagtctttgggagtaagaaacaaagtcataaaacttggggaggctgctaagtccccagttagagttaaaaatgtcagcaatatgtattttaacttattctaagagttgctgtatggacacattctaaaagcccttcttgggttctgttgctgtttttcccctttaagtctcatcattccagatgagtttagtaaaccagctccactgatgacatttatatttagaggtatcttggggacaaggagtgttgaagttagtggaggagggctttgtggacttttaagttcaactgtacacacattaatagctgagcataagcaccaggtgacttatctagggaaagctttttggggttttttgtcattgttgtttttttaagtcaaagcattttggatgaattctgtctgctctgttcagactaactccagctccttagcttacagtgccataggtacttaggaatggcaaatttgttacatgaaaacaaaatcatttttgtttgtgtttctctaaggtcaacagaccctgattatgatgacaaaagattttgagccaatcctggagcagcagatccatcaggatgattttggtgaaagtaagtatagctttgtgcaatattttgtgacctacgtttcttcccatttttgaccatttccttgtgcactaatagccatgtcattaggccaaagaactgtgaaagttaaacccccagctattaaatgtctattagcccagttccttcagcccatcccaaatcttaaaaggcctactgatgcctctccaggtctgagggtttaaggtcacttagatagttattacccaaaccctaggaaagtcttaggctgggctttcagtgaaagggactgtacaaggtagtatttctgggatacagttttagggagaagaaaagaagaaagatggaatagaaggctggtttttgttactacgattagatccaatctgcatttccatgggaacaatcagattattttcttgctaaaatctagccaaggtcatctgggcattaaggctgtgggggtattgaagggcagtgcaggagaagagagacgcttattaagcataagctttggccatcttgaagtcacaaagtagctggcctgattgaagagggatggggaagaagatgttccaacttctgttatggtctaacttcctgccttcttgctccatcaactctgagaaatcatttagacaacttctacccatttatttacaaataatgtatttgttcagaaataattttggagggctgggcacagtggctcatgcctgtaatcccagcacttttggaggatgaggcaggaggattgcttgagcccaggagtttgatactagcctaggcaacgtagggagacccagcatctacaaagaatttaaaaattagctgggcttggtggtatcagcacagtaatgacatgatgtgcaggtactggggtagcataagggaaggaaacgagtaactagagagggatgatttatttcccctaggaggccaacttgagctgagtctcagctgaattggtgttgggtaggtgagggataagggtggggagtagtcagctgaattggtattgggcaggtgagggataagggtttggagtagtcagctgaattggtattgggtaggtgagggataagggtggggaacagtccaagcaagtgaatgtgtccatttcaagtgtccatttcaagggagggttatttcatagaaacattgtgggttactcagggaactgtgagtaattcagcattgctgaagtggcagaatgtgagtgtagaatgaaataaatggaacagatttgattgagtttgtagtagggaatatggacattgagttatagttgatcagccattacaagttttgatgataagaggtttaaagagatttatttaatagaaagatggctcgtgatggcatatttttgttgtttttgtgtgtggagagggaagagatgagaggcagggtgatcaggtaggaggttgctacaggaatccagatgaaagataaggaaggtttgtgtggggctagaagcaggaatcattcaggaaaaaacttgattcacaatgaggatgggagtacattttttagaattagctgggaaacttttttagaatatatgtgcatgattccccttctgccctaggccagtttgagaaataccaatttagaaagtgaaataaataggctttgcgtatgtaaggtgaataagaaaaagttgagcaggactccagccagaacctcaggtgttgggaataaagatgccagtaacagggaagatggagaagtgctggtctgtaaggggtgggtggtgagatctgttttggatttgttgaaggaccatatgtgattgccatgtggagtatgcaaatataaggctgaagctcaggagaggccagagctatggactgagagtagtgggtatgtaggaaattctgacagttttgggaacagatggactgtctcagggagcagatgctgtacaggaagagtctagaatccagggtggaactctggggcatccagctttgaggacagtcagagagagagtaacagcacacagtatactttgggatgggaaagtgctctgggcctggtgtttcccactgactttttcacacaaatcctaatgcagtaaatcaaaggaaatgtaggccaagttaagatcttaggtctcagaaatgtgtttctcagtacaaaaaaaaaaaaatcattctatggagtgatgaatatttttcctctatcctggggtcagtagacttgttctgaaaagggctaggtcatgaatatgttcagctttgcaggctgtatgatctgtgttgcagctgctcaattctaatgttgaggtgtgaaagttatacatgatacataagcacatctatgttccagtaaacgtttgtttgtaaaagcagatgtaggctgtagttttgcaaatccctgctgtaaccgcatcatttcttgtcttccattggaaaagttctctttcttcattccttggtccttaatctttctgtggaaacttgcagatagaagcctgggggtttgcaccaggatagtcactaccatttgtacgcagcagcaattgaggtactgtagcacttggatgtgagcagacaggaaatggtcatatggacccataatttataggaattgcaaacagccctgcttcatcagaatcagaatcaatggcaggaggaaagtattgggtcctggattaggtgatgttttcaggaccatctttattgtgcttcttgcaaatggatcctacctccaggaacagaagggttgtgttgtttcagcaactctgcctaatagtttatataagagaagtgttacgatctagaaagaaccccagtcagcctggaaggcagaagacctgtgttctaacttttggctccaccattagggagggtctcaatctctaagtctatgtgaggagctgttttgtgacctgcagcccctctatcaccagtgagagcttgcaatcagaattttattcccagttctcatcttggggttttatgttccggacatattttgtaaactctttatgtttcattcttcttacttataaggtgagggtgagatcgctgacttgtgtcatcaaagaaacttggaatatgtaagatggcagtaaaatgctttccaaaataaggaagggcatttcaaattcttcaaagtcactgctgcatataatatgaaatgggttttgtttgtttgttttgagatgggggtctcgctgtgttacccaggctagagagtgcagtagtacaatcagggctcactgcagccttgaactcctgggttcaagtgatcctcctactttagtctcttgagtagctgggaccacaggtgtgtgccatcatgtccagcttattttgtatactttttgtagagatgggtgtctccctatgttgcccaggctggtctcgaactcctggactcaagtgatcctcctgcctcagcctcccaaagtgttgggactataggcatgagccaccatgcccagcctgaaacataggtttctcaaatattgactgctggtcaatttattgagaggcgttagaggacctgagtaattgccaatgactaacttcatgaagaatagcagtgaaactgtttttgtttcatttcatgtggcttattagttgtcttgccaattgttctgtaggcaagtttatcactgttggatggggtaggaaggagacacagttccatggatcagaaggcagacaagcagcttttcagatgcaaatggtaagtttggtttgatggataaaaagccttgactggaacaaatgtaagtttgccacccaccaggaactctttggtgtccacttagatgccagtaatgaacagttctcttctgctttagtaaaactgcctagaaccttcaggaaatgaatccctctagaaagatcctttttttccttgttattgccaagttgctttgtgatttattttcatagtagcaaataattataaccaatattcatcacccagtttaaaaaataaaacatcacagacaaaggaaaccccctgtgtatcccgtcccgatgtccctccccttcctctccagagagagctgccatccttcattcacatgcatgttctcatacttttcccatatatgtgtatattagatatttttctttttctgttggatgaaactctttgttttccttacttctggattggaaaattctgaagaccatataatgatgtcttgatgactcaaggcaggactttttaatcttctaatgtaggcggggcggcccctgaaggcagaggtgtgtggacacaagaagagtgcagactcttggggcacctggggaagtagtgtccgtgtcacattaaattcatttaaactcttatattttattttaatttatacaatatgaatattttttaaaactatgaattgaaaagtattacccttgagtaaaattaatgccccaagaagatgtgccatatttaccctctggcacactaccaagtacccccaggggcattacagatctctgttagaaaagtacagattacattatcctcataacatttagaagctatgagaccttggcagggaagtttcctaatgtttctgagcctcagtattctctgtaaagtggacaacataatgtctccttacaagggttgagatgggcaggtaatagcatatataaaacagctatcatagcatcagcacagtgtaggcactcaaatggtagttgctgcttttgttttagtagacaaataatttttgaaactttttaaagcgtagtttttatttcaaaacaactttattgtgagtaaaatatgcatagtgggtctaatttaacattctgaaagctattgacttattagaacagtaaaggattattagagggcagaaacatggagtaagtactctgagacacaaccttgcttctttgggggtgatccactacaactgcccagctttggacaagtggttttcatgtccccctgatttttaagtgattttttttttttttggcaggacttaaaaggtatccttgactaaacaggaacttgaccaagtaaatagttggtgcaatttgaatattctttcttgctataagcaacaagtaaattatggtacagctttctaagaccatatcttttcgatttaaaaatagcactttactcatacatgttatgacatgggtaaacctcataaagattatgctaagtgaaagaagccagtcataaaagatcacatataatatgatcccatttgtatgaagtgcccagaaggggcaaatccacagaggcagaaagtagagtagtggttgggtagggctgtggggtggggtggggaaggggtgactgctaatggatatggggtttcttttggggatgatgaaaatgctcaaaatttagattatggtgatggctattcaactttgtaaatatactttaaaaacattgattcttaccactgagtttaaacaaccaaaaaaaaatcccaaggtgcattgaattgtgtacttcaaatgggtgaaccttaataatatgtaaattatatcccagtaaaggtgttaaaaaatagtactttaaaggaatctatggtagttttgaaaataaggcagttttccatactttgttaaactctggagaagatgacactttactactggtacctgctagagtaagacttatctagtattaacaaaattagggtttattaatggtataggatgatccaggtaatgggggaaaaaaaccgagcatcctgttatctaatgtactatccagtaaactactctagctttttttcatgaactttttctaaaggctttctagggcctcgtcttggtttgaaagttcacagctacccttcagaaaagaaaacaaaaatccatggagtaggcagatacaagtactcatgtgagcataatttactttgattttttaagttgtgttattctagccctcagcctgttccctgcctgggctctcctagtgcccagtaacactgattcaagaggttgcatttagctgggcacagtggctgatgcctgcaatcccagcactttgggaggccaagttgggcagatcacctgaggtcaggagttcaagaccagcatgtccaacatggtgaaatcctatctctactaaaaatacaaaaattagccaggcatggtggcagatgcctgtaatctcagctacttgagaagctaaggtagtagaatcacttgtacctgggaggcagaggttgcggtgagccaagattgtgccactgcactccagcctgggccataaagcaagactccgtctcaaaaaaaaaaaaaaaaaaattgggtgagagggaggaattgaggaggataccaagggttgggcctgaacaaatggaagcataattatatgtagaaatttctatgagctactcttctagaatagatgactcaataataccctgcttgccatctacgttttctgtccttaattatttccagttctatttcatataatgcctatttcaggccttaacccttcagtaaaggaggtttggtttctataccctaggacagtttcattgagaataaattttgttaggctacctatgtattccctactgtgcagactacagtacagtactagcagaattcttaggctgttactagaatatgatgatgaatgcccgggtggtcatctgtctcccacccggtagagttggcttcaggattgagatacacgtggccctggaggagacgtttcttcccgtcatgctgcagaatgagaacatttccatgttttcgtcattgtctgctgctgcctttaccacctctgtggctcctccctattcaccttgttcacatcttaactcatctgtgccctgttgtgaagcttacacaatatgtaaacaaaactctaccctgttggacaaatggaacacttgtttccttgttgtagttacctgataggttccttagctcattatattcaggatctagatctgtagctcttttcctcttttgctgttctcagaggccactttttttttttttaatgccgaaaggaggattttgtttgttttacatttttttcttctttttgatgatttctgcgttctaagaaccaacccttggatggtttctgattctagaggcaggctttcaaagtagcttaaacctcttaaaaaacatctgtatctagtggtctgaggcttgtttgattctgggatacttaaggtcccccagtaatattggtgtttgttcccctttttagcatgagtctgctttgccctgggatgaccatagaccacaagttacctggcggggggatggacagttttttgctgtgagtgttgtttgcccagaaacaggtatggaaatatattgcagttaaacaacaataaaaaatttttatcttattaaaattaaggaaaattttctttcttttgctttgagtagggtattaattatacatatgaggcaaggatgtgctgctttaaatgtgaaatgaggttagagttaagaattagaagagtcctttgaggccatttggtccatcctcctacctggtggacacaaatttgtaacaaaattaatctaattggctatgtaaaaccatggcagtttttatttgtaaggaaggtgtttgaatagttctgaattgacaacttttatcataatgttttaagtgtgtatgtgtgtttgactccactcccgcacaggggctcggaaggtcagagtgtggaaccgagagtttgctttgcagtcaaccagtgagcctgtggcaggactgggaccagccctggcttggaagtgagtgggagaagaaaccttagagaaattcttggaaccagagtagaggtggtggtacacatggatacagatgatacagatgtttgtgtaacacaaaaggatttttacgtttcttcatttggttataaggctgtatctatctttgtttcttcttttttttttttcttattccctgaagtctgaattcaactcgaatagtagattttacgcttcttcacagatttcattgttccaaggccgcatatattttgcattcctaactcttaaaaggctgtggttttaaggcagggtatatatgaagccattgtacagagcagaaaatggtgtttagaagggaaggcccagtttgcaaggctctgtggggcaaatggtgcttttgtggaaattagggaaagagcctccttccttggcacaaaattcctacagcagaggatctgcttgccaaggagcatgcaggctggattcagaccctgctctttccttccattctcctccttggcccagtacccttgtgcaggttacaatttgcctgtcatatgtggctgcctgattttagatagaagatgtatctcctctgtttcggtgatatctgttgtatgtagacctcttgtttcccaccagtatctgaatggtattatatgatagagcagaagagaaatgtatttgaattaaaaccctagagacaaatatgaataagatgaggcaattaagatgttttcaacatttggtgaagtcttaaaaaagacctactggagcatagaatatttgctgaagttgtataatggaaggagaaatagattttgatttttaggacattatacctggaatggtttagataacttattatttttaaagtcatccaaatgcaatgtaaatatgtaaggttttgtgggcaaatggagcctctgtgtaaaacaggaaaaggcactctttcctctgggcaagtacagtcccacagtgggatgaaccgctcgccgagagacaagggacacatgggatttaaaacttccttggataaagatattcattaattcgttcattcattcattcatgtttgctggaaaaaaaactcttctggattttatctattctttagttaggtgagctttcgatattgtaacactctgagtttgctttaagaccctcaggcagtttgattgcatctacacaagataaacccaaccagcaggatattgtgttttttgagaaaaatggactccttcatggacactttacacttcccttccttaaagatgaggttaaggtaagtgcctgagtttgtttcaccctcgaatgtagaggactttccatagctatagagggaattttttttttttttttttgagatggagtttcattcttgttgcccaggttggagtgcgatagtgcaatctcggttcactgcaacctccgcctcctaggttcaagtgattctcctgcctcagcctcccgagtagctgggattacaggcttgcgccaccacagccagctaattttgtatttttagtagagacggggtttctccgtgttggtcaggctggtctcaaacccctgacctcaggtgatccacccgcctctgcctcccaaagtgctgggattacaggcgtgagccaccacgcctggcctatagaggggatttatatttgatatggatatataaatagtagctttagagtaaatagtaataaaaatggtggcttcctagaactgatttttatttaataaaatattgtttttccagtgattttgcaaataatagcatttgtcccccaccttagataaaacagaagtaggaaataaaaatgctagtttttattgtttattttgacaaaagcataatttttccagtaatgaagatgtttttcatttataacatttaaatcttaagtggtttgtataccattaagattcttgctgaagtgagaacacatcaaatggtatctctgtgtaaaattttaaacatcctaagttgagagacgagtttaatgaactcccatgtaactattactcactttcagtagataccaacattttgcaaaactattttcatcggtccgcaactctttggcctatacatatatatacttacatatatttttatttcctggagttttaattctagaaatcatattttcaatatttatttataacagttaaggacatttttctttacataaccataattctattattacatcttatctctgtgttgtctaacacccagtccatattccagtttctctgattgtctaaaaatgtcaccttgtatttggttaagtttcttaagtctcttttaatctttaagcataatgtatttcttttttttaagtcctctacataataatgacatattttacagatttgtttaatgcctctgtaggttagtgatttacagctagggatgagctcaggtagtgggattatttgatttgagagaggaaatacagctattataaagatttggaagtaaatccataactgaaagccaatgacagatcttttttcccttctaggtaaatgacttgctctggaatgcagattcctctgtgcttgcagtctggctggaagaccttcagagagaagaaagctccattccgaaaacctgtggtaagacagctgtagtaccccagccttctgccccataaaacgtagttgaaagtagacaggtatgggatttccttcatcccttctacttagtcccttagtagaatcaaagatgctgaagtgggtaggtggaaatgggggtggttaggttttgattgattgtggatttcagtcatgtattggttggggttctctagagaaacaaataatacatatatataattcgtccctcagtattctcgggggattagttctaggattgcccatggacgccaaaatccacacatggtcaagtcctgcagtcaaccctgcagaacactcagatatgaaaagtcagccttttgtatacttgggttttgcattcctcaagtaccatatttttgatgtgcgtttggttgcgggtatagaatccacaatatgaagggccgactgtattcattgaaaaaaatacgaatataaatggacctgtgtagttcaagcctgtgttgttcaagggtcagctgtacttacatagagagacggtgagagagggaatagggtggggcgggagggagagagagtaatagagtgtggatagatttactttaaaagattagctaatgtaggggatggcaagtttgaaatttgtgggggcaggttggcaggctggaaattcaggtaagaattgatgttgctgtcttgagtatgaaatctgtagggcaggctggaaacttagggaggatttctgttacagccttaaggcagaatttcttcttttctgcgaagcctcagtttttgcttttaaggtcttcagctgaatgaatgggaccttcccacattatggggaataatctgctttccttatagtcagccgattataaatattaatcacatctacagaataccttcacagcaacatctggagtttagcagatagctgggtgccatagcctagccaacttgacacaataaaattaactgttgtaagtcatcacgtgctttccctagtgcatggtattaccacagaaaaaacactaaccaaaggaattctgtggacgtgaaagaagatttagattaagcgtaaaagtaagaatatttttatagcttttaaaatgtataagtgtgtggttttaagtattaaataatacttgaaaatgttagaaaataagatgagaaaaaaatctcatagttctaccacttcgtaataatcactattcaaattttcttgtcttctaggtttttcatgtatatatctcagtatagctatcatcttgtttttgttaaaagtgtagtaggtatgggccaggtgcggtggctcatgcactttgggggcccagcactttgggaggccgaggcgggcggatcacgaggtcaggagatcgagaccatcctggctaacacggtgtaaccccatctctactaaaaatacaaaaaattagctgggcgtggtggcaggcgcctgtagtcccagctactcaggaggctgaggcaggagaatggtgtgaacctggaggaggcggagcttgcagtgaatggagatcgtgccactgcactccagccttggcgacagagtgagactgtctcaaaacaaaacaaaaaaaagtgtaggtgtgatacatctgcatcattttaaattgctgtataatactcgtttattctcgttcattaaatctcatgctgttagacatttacagttttgtcatttctcattattgtaaacagcaatgcatggtacatttttgttcataaatctttttacttgattattttctaagtagctttcaaactctttaatcagtagaaccccccccccctttttttttttttttggagacggagtctctctctttcccccaggctggagtgcagtggcccgatctcggtcactgcaagctctgcctcccgggttcactccattttcctgcctcagcttcccgagtagctgggtctacaggcgcccgccaccaagcctggctaattttttgtatttttggtagaggcagggtttcaccgcgttagccaggatggtctcgatctccatctcgtgatctgcccgtctcggcctcccaaagtgctgggattacaggcgtgagccaccgtgcccggcctcagtagaacccttttaactgcaatgttaagaaactcattattcattcaacacaatagttcttaaccctggccacacctttagaaaaaaaatgatattcaggcttcatctcaagagttcagttcagtgtgttggaatggagattatacgtaagtatttaattaaaaaccaaaagcccccaagtgattttaaacagccgcagttgagaaccaccgattaaccagtgtgtcaagggatggcactgtgatatgctgagcataaaaatattgcacaggatgaaaccctgtctctactaaaaatgcaaaaattagtccggcgtggtggtgcgcgcctgtagtcctagctactcgggaggctgagacaagggaatcgcttgaactgggaggcagaggttgccgtgagccgagattgagccactgcactccagcatgggtgacagagtgagactccatctcaaaaacatgtatatatatatatacacacacacacacattgcacaagaacagccacaacatctgtgctcacagaacatcagcatgtggtctaacttcaaagtgttgtaataatgcggtttgagactaggttatgtttgctgtgatcactaagttaagcattagtgagcaaggagattgagaaaatccttaatataaataatatttcttaatataactataattcctaatataactaaggtcttaatttatatgtcatctgtttagtaaaggttggttttggcatgattaagtcttgcttgcttaatagatgttggaaggataatttcatgcttatcttctttggacagctgaatcaggattaatacccagatagccttgaacataagtgcttgcaaagcacctgaaagaaaataagcatcttaagcccaatacaacacaatgatgctagtctagatcttggattaagtgttttaatacttttactctaattgccaagttatcttcttcctaaatcttcatgagaaaacccactaaaagaatgctttttcctggtagccttccattgtgatcataaagtttggaagtaaagttgaaaataaacatgtgggccaggcacggtggctcaggcctgtaatctcagcactttgggaggccgaggcaggcggatcacaaggtcaggagatcaagaccatcctggctaacacggtgaaaccatgtttctactaaaaatacaaaaaaaaaaaattagccgggtgtggtggtgggcgcctgtagtcctagctactcgagaggctgaggcaggagaatggcatgaacccgggagatggagcttgcagtgagccgagattgcgccactgcactccagcctggccggcagagcgagactctgtgtcaataaaaaaaaaaaaaaaacgaaaataaacatatgaataaaagttaaaaatagaaaaaaaacaagaaaataaacatatatttctgaccttattgattcttgatattttatctgcatggaaagctattttttggcagttattattgttcttattttagagacgaggctgagcaggaagggtcctttgaaaaagaaaagattgcccttgaacccctctggcaagtgggatgaagtctgcttcccagcctctaacggccttcttttcattttcccttgcagttcagctctggactgttggaaactatcactggtatctcaagcaaagtttatccttcagcacctgtgggaagagcaagattgtgtctctgatgtgggaccctgtgaccccataccggctgcatgttctctgtcagggctggcattacctcgcctatgattggcactggacgactgaccggagcgtgggagataattcaagtgacttgtccaatgtggctgtcattgatggaagtaagctcctgggaagtgtgtccatgagcctgcaaggggtcctgagcctagggcctgcagatgtggtggtttgactggaacagtggggaatctttatttgttttggctgtttgggttacttgtttttttattgaatgggatataaggtggggtatgttctctcctgagaaccattgtcccccctcccccaccagtttcctgttatactgcatctgtggccttcacacgtttacttgcctggcctttgaagacactgaaaactttgactctaggtagagaggatgacaacagtacagtcttgtgggattgggtgtgttagctttatctgtttgccctgacacagatttataattgacccttataccaccccacttgtgttgctttgtttcctgatacaaatgcttgctgatatatacctctccagtatgttcagttcatgcataaacgtttgcctaatatgaagattaggtttatattttataatgaggtagaaggtttttttagggggtggggtgggaagggcaagactgaagagtgaagtagtcaccttaatgaatagtttcattgctgatatgaaagggagcactggcttctaagattgtaatgtgaggtggtatattaattcatattctgtgtaatattctacataatactgattttatagtcatgtattctatatagagaacttaatcagatctgcgttattaccaaatccacacataggaaagtgctttaaggattttgaaagtattaattcccttggtttagtgtggcttggttgcaggcccaggtttaaagctagaggtctgacctcttggcctttttgccttagtccctggcacctgaaactccaggtactgagatggactcccctaggcctagaggtgacaatagccaattatggacagaacccatgacatttccccatcccacactgtttttagacttgttcctgagaaaaacattgaaagttatttttttgtgaattgccattattgtttagatatactgtgatgttcagatggcttatcttacaaattgaatatccctaggtctaatcctcttctttctttttcactgcagacagggtgttggtgacagtcttccggcagactgtggttccgcctcccatgtgcacctaccaactgctgttcccacaccctgtgaatcaagtcacattcttagcacaccctcaaaagagtaatgaccttgctgttctagatgccagtaaccagatttctgtttataaatgtggtatgttataaaacttttgccaagatgttctgaatcaagtcccttctactcctacataaaagcaaattatagtttggtgttgccataggtctagtgtttctcaaaatttttaagtctgcagttgatatcattatcattatgatatttaattgccttgggtttttgttttttttttttttaatcctatactggtttgtacgagccattccttttcccttactgacttgaagagtcagttatttaagaataacattggactctggaaataacatagtatgttatacattgttaacatgttttactcttttcatagcctttacacatattttcagttgatctcatccctcctaggagctgtgtcagagatggggttttcctcttttgtagatgagggaacacagtgtcagaggttttgtaatttgtttgaacaagaatggacaaggacctcaacacaggtgttctagctcctaatccacttgtcctgccacagccccattgctgtcagttcttcattactttcctgatgtgctggagaatctgaaatttgtttttacttgtgagttctgtggttatgtcataaattctgctggcatatggcagtgttagccttgttttcaaatatcttttgaattctcagaaaaagcctagatagttgccaagagagaataatcaaaattaattaatttaaatgggaagtccttactttcatatcagcttttctgttaagtcagcagcccactgtgtacatggatcctatctggatgtatcaccagtttctctgattatagtttcagtgtgtaaaatgctgttacagtcctccttaaacttttcaaaatagctttaaaaaaaagtgcaaatatgttcattgtcaaggcaaaaagaatcagatgtaagcttttgtgggacttaactgtatgatgctaatgagtttatatgtcactttatgatgtatggtatgttttgttctgcattcacttaaaaaatagctttatatcattcatctatttaaagtgtacaattcaatggtttatatgtgtgtgtatgaatatatatacatatgtatatgtatatatatgtatattcacagagttgtacagccatcaccacgatcaattttaggacgtttttatctcctcagaatgaaaccctgtaccaccctgcattcattttacttgagagaaaactccctgtgatgagataggacaggttgagagctccacttttgaaagattgttcggcatcaatatgtggggttggccataggtcaggggcacctggaggcagagattctagttaggagaagctgttgtcaagtgtccaggcaggagctagcaagagcttgagccagagcagtgttcatagaaatggaaagaagagaaagatcataacaaatccatgaagtaaaaaccctgagaagttaaagaacccactggggagagtttggatataagagaatctggaaaaagagatcttggactggaacaggtcagggctccgtgcccaagtggaagggaaattaagaacttggagtcaagtggtagacatttgagtggtgtggagacaagttcgttgccaaagttttcaaagatggtgtttgatgcatcctgagtatcactcctttttccccctcattgcttcttgattgtttattatatgccaggcttttttctagtacttggcttgttgtactagaaaactagttgtactttgtctacaacttgttgttctaggtgtagacaaaagatatcaattaaatatgatctatcagatggcaagtgctgtggagaaaaattaagcaaaataaggggtagggagagcttaaggataagggtttacagggggaaggtgtctttcctatttagtgtgatcccaaaggcctctctgtgaaggtgacattgaagcagagacctggtgagaatcacagtgggagccacgcagacatctggggtaagagcgtcccaagcattctatgcttgaaggcaaagaagaaaaaagaaagagcgttccaagcagagtaaaaagcaaccaccgaagtgcctgttgtgtttaggaaatagccaggaggccagggtggctgcagcagagcaaaggaggggaaggtggtgggtgagttcagagtggtgatgggaatctgctcttgtagggccttgcggcttttactccgagtgagataggagccaccagagggcttagaacagaggagtgcagtgttctggctgaattttttaaaggcttgcattggctgctgtgcagtgaataaactggatgaagaatagaaagaaaatgtcttttaagcaggtgcttaggactttggagaatttgaggatattgagaggtggttgaagacagtggaggaaattgtccacagcactgggctgagagggtagccccttcacctggtcttgctgagatgtggcctttgtcagggaagattatgactgatgtgttcttaagaggaaagcagaaattttaaggaggttgagatgtgattattttctagattgctgtttgccttctagaactcattaattgcagacaccatccccttagtattaggtgaaatcttataatttacgatgataatatttgcatttttgttttccaggtgattgtccaagtgctgaccctacagtgaaactgggagctgtgggtggaagtggatttaaagtttgccttagaactcctcatttggaaaagagatacaagtaggttcttaattatcttgggcttctgggaacagaatcagccagcatgcagtcctaaattcagccatctgataacagttctatgcctgttgctgagtggaacaagaaataaagacaacacccaggccctgactttcggatctgattggagaagccagtcatgtagtttgtctgaatgccatataatttgataggtagcaggagagcatgagttgtaagccagcctaggacctactcccaatagcgcttggttctccaggaaaaatcatgtgggaaagatggagatgacaatgataaggcggagctgcattctcttacataaatggggatgtatgggttgttaacatggatgacctaatgcagcctctgtctttgctccatcccagaatctagaacttctgggtgctgtgctttgaggctcctgggatggaaatcagaatgcattcttccattgaaacagtattgtaaacaattggatgttattgaatacctcaggtacactataggcatttgcaaaatgacctagaaaccaaattataatgccacatctgtgagagaacttttttaaaaagtaccacttattgagtacttacagattaaaaaaacaaagtgtagaggttaggtaacttacccaaggtcatggacctggtaactagagaatttagggtttgattctattctgtttgataagtccatgttcttcattactaaactactctgcctccagggaacatttattgttagattaatagaaataattaactgagtacaacaaatagcagaatttaataaataatgtttcttaaatatatgtgatatatttaataaatacagcagaagtgttcaacctctgtatgattttgaggctgcctgtataatgcttagtagtttttaaagagcatttacatgcattatttcacttcatagacttgaaaccactagagtagagatagaggacaaattagaaagtatgaggcagtttagaatatagtttcatttaaaaaaaattgatggggataatgccaattcgtctgagatttcacagaagacatgagtactcatcgtgatcttggggaagggataggtttggggttggcaaagaattgggaacattgggtctggtggggaagaaagtgtcagtgaaaaccagaggtgggactgatcctccatgggatactctatgtgaatgcaatggagagcctgagtccggggagagatgtttgaggaggaagatcaggctagtgaccaacttcttcagtgggagctgcggatttgccacctgatctaaaaggcaggaagtagccattgtcggttcctacgtgaggtgacaagaacagtgcgctggtcaggtgtataaatgctaccaaagaatgcattagagacatggagaccatctctcaagctagtcagtcagtttaatgtgaggtgcttaggaaaggacccattctactgcaagtgacatacctgccagagcctggtttgaatgctggtaagtcatggcagtggaaaagctctggggttcattagtgtagggactagggctggtaattttcttgtgtagtcagtttcctcaagtgttctcttcaaatttaaagatttcagggtatgagaaatttagggaaaatataaaaacgtattcttaagccagacaaagattaattttagattttgtagtatttggtagtatctcaggttttgtccctccaaataattaggagtggactgtatacaagatgcttcagtcttccttcatccaggaacgtctcagtggtttttaagttttattcatgtcttggatattcttcaatatttacaatagaatccagtttgagaataatgaagatcaagatgtaaacccgctgaaactaggccttctcacttggattgaagaagacgtcttcctggctgtaagccacagtgagttcagcccccggtctgtcattcaccatttgactgcagcttcttctgagatggatgaagagcatggacagctcaatgtcaggtattgcagtttttccctgtactccacatgttaagcaaatggagttaggtttttgtcttttatgagcatacaacttttgacttctattgatcaaggttgaggagcagtagctttcttgttagacacacttaacaagaaggttaagtctagttatgagccatgtcaaaataacagaccaaaaatatatcaaaaagtggtgaaaaataggataaatattagtagatgaagcaactttttaaagatatgttaaatattttaatttagcatctacccacatttttccagcgtgattgttatatgttataattgattttaataactgtcaagcataattagagtggctaattctcatgggctaatgtgatgggaagaaattttgtataaatgcagtcatgcgcatatatgtgtgtgtgtgtgtgtgtgtgtgtgtgtgtatacataccttttctatgtttagatacacaaatacttgacatggtattacaattgcctgtagtattctgtaaagtaacatgctgtccaggtttgtagcctggtagcaataggccataccccataggctaggggtgtagtaggctacaccacctaggtttgtgtaagtactctatgatgtttgcacaatgatgaaatcacctaacaacacatttctcagacgtatccccatcgttaaatgatgcataattgcacatatatgctttgttttgatgtggtgacttcaaaatgcttcttccagcctcctcttctatatatcctattttgtacctgactacatttaccattagaaagtctctattcttctttgctgaaatttcactgttctctgggcctgagttttgttttgattcctgactatatcttcattatgtaacaggtttcagttaatgaatgctcttctgtgtaatgtaagccctgttgtatagttgatagcattttctagccagttcccagaactccttgtttccagtgtcaatacttggcacctttgtccactgacactaatccccagattaatttgtaattaaagccctactggtgagatttctgagaaacgttgttgcaaaattaggaacctttcctttatatatatacattacataaatttatagacataaaacattttaatgcagtcatttgctgctactctttgactcatagtctttcgtgatattttgaaaaagccttttgttaacatgtctaaatgcagaatatgttctagaaatatgtagcacttaaagtaagccattagattaccttttgaaaagcggagcaatttactaagtttctacttcttcagatttgaaattcttcatcattagcttgtagaggcaaaagcttgatgcagtcatctcatttgctgtaaaggaaatgagaagtcatttacagtatatttctactgctttgacttttatttctcaaaaagactgttttgttcatataaaatattaatgcttttgaggactacaaagtccctcgatttagtttacatttactttagcttatactttgtaaaaaatactcttctaaatgctttgtctgttttagcttacttatttctcataatacctctgtaaagtatatgccatttgcaccatcattttacagatgagacaactaagacatggagcagttagataacttgcctgagatcatgcaggtggagccaggatcaaatcccagcgagtctagctccagagtttgttctcttcttgacagataatttatcctcacaaaatttgaagcatttgtagaggaattccctattgttataatgtttagtttttttgtagattggttaaaaactttgaattaaatgttagcattaacatcatttgcttttatcactacttctttgtctcttttttctttttttaatcactacctcttcctcctcttttgagaaattctgcttccgtggctatggtccaagctacttgagaaggtgaggtgggaggatcacttgagcctaggaggttgagattgcggtgagctgtgattgtgtcaactgcatttcaacctgggcaacagagcaagacactgtccaaaaaaaaaaaaaaaaatagtgaaattttacttcgctccattgactcagggaaaaaatgtaatggtgataacaaattcccttcatctcattagtgaaaatccacaattttccatcaatcgatatgatagtgatagagatattgagtgtgctcattttcctacagaccagctgctttaactattttaagcagacagaaatgatattggtaccatccatgtctaatgaaggcaatactttgtaataagttgcagtaagttgtggccagaagaggaatgatgacttcacagtgtaaacaactaccttattgggtttgtggaaaatggtgtcatgtagcagatgtggctttatctgggctttggtttggagtagttttatctattcatctaaccgtctgtctctaagtgtataagtgtgtgtgtgtgtgtgtgtgtgtgtgtatagtattgggtgtgtatatatgtattttgtctacattgtattgaagtaggtagtgcagcatcaaaaggaaattgttgattttcaaaatcagtgaaatgtcactatttttgagaaaaatggtctgtttacactcccttctccttttttttgtcagttcatctgcagcggtggatggggtcataatcagtctatgttgcaattccaagaccaagtcagtagtattacagctggctgatggccagatatttaagtacctttggggtgagtatcaaggtgttaggaaagcatgttatgacttacatagatgcttagttcttaagaacatgtacttgtatcttgtcagttcaatattgattgtcaggtcttttaactaccctggaaaaccctaagctttagagtggaattggcaagtgtattctactcctgtttcctcttttaatgaactaacgtactcttaaaaaagtgattgatgactatcgcagggacaaaaaaccaaacaccgcatgttctcactcataggtgggaactgaacagtgagaacacttggacacaggaaggagaacatcacacacctgggcctgtcgtggggtgggggagggtggagggatagcattaggagatatacctaatgtaaatgacaagttaatgggtgcagcacaccaacatggcacatgtatacatatgtaacaaacctgcacattgtgcacatgtaccctagaacttaaagtataataaaaatatatatataaataaataatgccagcattagagaaaaaaagtgattgaaattgcatgttaagtgttttagcaaatgttgatgttgatggttttttgcaaagagcgcatcagctatttgtgaactagatctgtgaatcttgcagagtcaccttctctggctattaaaccatggaagaactctggtggatttcctgttcggtttccttatccatgcacccagaccgaattggccatgattggagaagaggtaggtgaacacggagcaggaaatttacttaaagtagttacccagggactgatggcattaagtagaaagagcgtgggctttggaggtggacttgggtctccactaaatgcctagacaatagtgggaaatgatctcactttcataagccacaccttattcatctataaaatgggaaaatcagtatctgtctatcagggttcagaagactaaatgagataatatatgtgattagcaaccttttatccctagttgtacaaatcattcaaagttaattttatttaggaggggaaacagaaatgtgatcttgagaatagttttagtagatttttattcaacacatactagaatgcctataattgtggtggatggtagaatgcagtggctggaaaacaaaaccgcttgactaattcctgctcttctggaacttgtgatctattaatttcaatgtaatgattccctttgttgggagtgtgatggaaatggacagagtatactggtagagaatactgagatgtttgaggggtaatttgaggatggtggctatgagaatgggagtcctgcatctggtggtccaggaaggcctctcggaggcagtgatgtgtgtgctgagatgtgaagaaaaagaaggctctgtctccaggcagaaggaacaacaaactccttgagcttagcaagagctcatcttattcaagggactggatggaagtattgtggctggagctcagtgacagtcataggagggaatttgggttctttaattgaacaaagattagaaacttcttgtgatttttaataacagagtaatgtgttctgcttcatggtttggacagtgattctggctgcccagaagagacttgattggagagtgacgagactggaatatgggatcaacaccggttgagtggagttagtgaggggaaaaaggagatgggtttgagatatgtgtaggagatggagatgtcagggctcactgatggattggatggcttcacattccattttgcactggaccagccacgtcttaggtatctatctttagtcctgattacaggaacttaggtgtgaaatcatagggtggtagaactatgtgatagaaaaggtaggtttaactgatttgagatagaattgcttgtgatttcagttttatttctttgcaggaatgtgtccttggtctgactgacaggtgtcgctttttcatcaatgacattgaggtatcaaggcttggtttggtgttggatccttttcacagtgttagctccgagtaatctagctagctttcacccatgcctctctggccttctcttgcaggttgcgtcaaatatcacgtcatttgcagtatatgatgagtttttattgttgacaacccattcccatacctgccagtgtttttgcctgagggatgcttcatttaaaagtaagttttcaatgtataaaacagaaatggtcccttctccaatgtcttttggagtcttgatgactttttgaattcttcatttattttggctttttatcaaggagtcctaggctggagaaaatctttagagttattttacttagaccctaatctcaacataatatctcagttaaatcattctgcactttagtaaagacatccaaggaagggagttccttccttaagcagcacattctaaagttaaaaacttttcaggaaattttattatgtaactgatctaatattttatttggaattactatgtagatccccaatgttttaccttctgtgtagtcttttcccactgtgcccaccctccactgtacatctgcgctccatctagtggtttgtaggatattggctgcattttgtcttctgttccatgccctatctatctctgtgtgtgtggcgtgtatgtgtgtgtggcgtgtatgtgtgtgtggcgtgtatgtgtgtgtggcgtgtatgtgtgtgtggcgtgtatgtgtgtgtggcgtgtatgtgtgtgtggcgtgtatgtgtgtgtggcgtgtatgtgtgtgtggcgtgtatgtgtgtgtggcgtgtatgtgtgtgtggcgtgtatgtgtgtgtggcgtgtatgtgtgtgtggcgtgtatgtgtgtgtgtgttccttattctaaaaagccaacttattttctttgcttccaacttggaaatagggaatctttctttcattgatatgattatagtacactgataatgctaagaaatagagaagttgccccaattcttaactgtgtttctccacatcatttgagaagctgtgtatgtgaatgtgcatgagggctctgtaagagagagggcaagttccagggatgagcgtgttcatcagcagggctgatagtcttgaggttcagtgggagagctaaggcacatggttgttatttgttctcttctatttcacataatgtgtgcggtttcaattgcagttaatggagagtggcttgttgtgataattaaggcttattagttaatggtgtgtttagcattacaggccggcctgagcagcaatcatgtgtcccatggggaagttctgcggaaagtggagaggggttcacggattgtcactgttgtgccccaggacacaaagcttgtattacaggtaagctggtttttcagacaagatagatagtctgattgtcattcagccaagtaccaagcataattcttgcaggttgtattttaggctttcttattctttgtatcgtttattgtaaacctttccttgatagttttctgttagctttattcaaaggagtgttgatacaggctgtgaccataaggctcaaagcgaaacttttcttgaaagtcaagataaatatagagaacaacaagattctgctaaaagtgtgctgattttagagagttgtggtaattctctgtgaagagttaggtaaaatggtgtatcctggctatttaaatgttttctacttaattaaaaatgttactgctttaatttatttaagatgccaaggggaaacttagaagttgttcatcatcgagccctggttttagctcagattcggaagtggttggacaagtaagtgccattgtactgtttgcgactagttagcttgtgatttatgtgtgaagacaataagtattttattacaatttcgagaacttaaaattatgaaaagccctcattacctatatcatcaatcagattcttagaggctcttttttttttttttaacttttttactttaatgcagtattttgtagtggagattcctagcagaaagaatcgtgacactcatcatataaaggagggcttctcttaacctgagggaacacatgtgggttttaggtggcctgtgaacccagggagattgtacacaccaaaccttgtctttgtgtatttattcaagtagaaagcccacagctttcaatagatttacagcggggcctatgacccagaaaagcctgagctactcttgtgaaggaaatgactgattttctgaacctatttggaggaaactttgtattggaaagatctatactaatgttttgtttaaaaagtagacctgaattccatgatgattttctttgttttttttttgagacagagtcttgctctgtcacccaggctggagtacagtggcgcaatctcggcttactgcaacctctgccttctgggttcaagcaatcctcccacttcagcctcccgcatagctaggattacaggtgtgcaccacgcctggctaatttttttttttgtattttcagtagagacagggtttcaccatgttggccaggctggtctcaaactcctgacctcaagtgttctgcccacctcggcctcccaaagtgctaggattacaggtgtgaaccaccgtgcccgggcttctgtaatgattttctgttgtatgtatgtgaagatgtagttctcagacagtcatgatgactaaattacaccttttaagaaggtaaatgaatgtggtacctgatttttttattctgtaatttcagagtagaaatccagtgatagcagcttggcattggggctgtaatctgattataactggtttgtatcataatgaaaatatgctgggcccatggagctcagtttttgtgaatatcttttctattctttctctgtcttctcacagacttatgtttaaagaggcatttgaatgcatgagaaagctgagaatcaatctcaatctgatttatgatcataaccctaaggtaactttctaagctgtcatttactctagcttactttgtacttaaactaatatgatctgaacgaagatgttttgtcctttttttggtaggtgtttcttggaaatgtggaaaccttcattaaacagatagattctgtgaatcatattaacttgttttttacagaattgaagtaagtattttgaataattcatgtgtatcttttccatagttttctctcttcttgttaaggaaatcaagcataaatagctagagaagaaaaattccttactgttcatttttaaaaattgctataactcttagatgccagttggttttttgctcttttccgttctttttaaaacagcctgtttaaaactatgtccttaaaacatgtcattcagaattattatttcacttgatttttaggtatacatataaaactacttgtttttcctaggagactgaaatcaaatggcatctttctctctgatgatctttcccctcaactttttaatgaaacactttcaaaatagagaaaagttgagagaattgtccagtaagcaacctatatataccccacctggattcgccagtttatatttttctgtatacacattctcattctctataatctgtccatccatcattcatcttgtttgtagacaaattgctaagtgagttgtagacatcagtccactctaccacctgtacttctccttgtatatcattaactagagggcattctttgtgtatgggttggttttgttgtgttttttcaggtcatatttatctacagtgaaatgtccaaatcttaagtgtgccacttagtgagttttggcaaatgtacacttcatgtaacctgaacctctgtcaagttagagggcatttactccttttcagaaagctgcttcagattcctttcaatcagtccctgtcccattccccaggcaactactcttctgaattttttaccataaatcagttttgcctgttcaagaacttcacctaaatggaagcatacagtattactcttctgcataaagctgttttcattcagcatattgtcttgagattcatctgtgtttttatatgtatcactagttcattctttttttattggtcagtagtatgccgttgtgtaaatacaccactatttgcttattcattcccctgttgctggacatgtggattgtactaccctgtttggggctaatgtgactaaaacatctacaaacatttgtataagtcttttgtggacatgttttatttctcaatatttttataattcaactcttttccaaaagtcatttttatttatcatcatcagcatgccaggtgtatgttagtaatttgatcgctgggctacatgttctgttgatgaccattccatacacacctgttcttagagaagaagatgtcacgaagaccatgtaccctgcaccagttaccagcagtgtctacctgtccagggatcctgacgggaataaaatagaccttgtctgcgatgctatgagagcagtcatggagagcataaatcctcataagtatgtatgctgtcaccaggtggcatcctttgaaaaaccgaagtgtgtagttgtccttgtccagcctacttacctttctcattctggtgttcttcacttattacctcagatactgcctatccatacttacatctcatgtaaagaagacaaccccagaactggaaattgtactgcaaaaagtacacgagcttcaaggtagagatccgctcacagagaaagtgcttaaggtggccgtgactgctactagtcttctgcaggtgacaatcaccatgtcattgccacaccacagatttaacatgtgactttttagttgccattttaagacccttgtcagtttttttcagtgctgccctctaaagcatatataaaagtatcagaagtatatattcttctgatgtccagttctattgagaaaaatttattgtctttttggttatgttgttaggtctgtggattttttccccaaatgattgtgttctgttttgttttctaaacactgttaggaaatgctccctctgatcctgatgctgtgagtgctgaagaggccttgaaatatttgctgcatctggtagatgttaatgaattatatgatcattctcttggcacctatgactttgatttggtcctcatggtagctgagaagtcacagaaggtatgtggagttcttacttttatgccatttggttcttgtttatataatgatagtgtgaaaccctgcttctggtagtgcagtagcttttctgctatcactctgtgagtgcagggctggagacagatctgtgagtttctagggcccacattcctaagcccctgtgcttatgaaagtgttttgattgtgaggttgaagaagtgaagtaaaattgcatggcttttttttgtttctttttttttgagacggagtctcactcagtcgcccaggctggagtgcagtggtgcgatctcggcttactgcaagttccacctcccgtgttcacgccattctcctgcctcagcctctctagtagctgggactacaggtgcccatcaccacgcccggctaattttttgtatttttagtagagacagggtttcactgtgttagccaggatggtctccatctcctgacctcgtgatccgcctacctcagtctcccaaagtgctggaattacaggtgtgggccaccatgtgcggcctaaaattacatggttatttttaagatgatgggcatatgtgtgagctaatttcttctcttataaaggaaatgtaacaagtggttcatgttccactccggttctttctcacatggctcttttttctagtggagggtgggcacatggagcacagaaggctcatggcctcctttcctatgttggtacatttgctatgatcaaaaactttgaacaccactggtatgcatattttttatttatttttttgcagcctcagtctcttccccatgacctctccaaaaatgaaaatcggatccttcatctctctgcttaaaatacttcatgagctcccattgttccgaggatataattcagaagccataatactgcttaaaaacccttccttgacctggcctctgtgtatctttccattctcacttcttggtattgtctttttttcctctgcccatggaggaaagacaatgcttttgtcccccttcccttgcccctcaccaccacatgccttggtgggcagcattacttctgccatccatgggctttgactgcttccaccctcaccattcccctggctaattctcactaatctaggttaaaggatgccaaggtggcctcttcccagtaagccattcatgcttccctccagggactgggtgaggtgaccctcctatatgcttctgttgcacacagtgcctacccctgcagactacagtgtgtctttatctagagtgcggtatttatttatttatttttgagacaaggtcgggctctatcacccgggctggagtgcagtggcaccatcttggctcactgcaacctacgcctcctaggctcaagcaatctcacctcagcttacaggcgtgcaccaccatgcccggctaagttttgaattttttttgttgagacggggtttcgccatgttgcccaggctggtctcaaacttgtgagctgaagcaatccatctgcctcggcctcccagagtgctgggaatgagcacttaattatttgttgtcttgggttttcttcctatgttgttcttacatgtatttatcctgtcagcccagggaaattgcattaaaaacaggaaacacctctccattaggaagaaaaacaatttgcttacagggcatggcatagagctggagatgatagtgccaataaatactaggttggcagggtctcagagttttgtgtccaactcagtataattttatgtttgttttaatgtgatcatttcaggagagcatggaatgtcatgaaaacagcaccaagagcaatgtcttagacttttaggagaaacttagatgcatttgttgaatatcttctagactgaaaccttatttcccttattagcctatgaaataaatgatactgtgagacttagttaaggaagttactattattccaagtgtaacttattaatatccgtatgtgaaagcatttttgccaaagcttgtttgatgttcagctgacccttgcacaacgtgagtttcaactgtgcgagtttgaactgtgtgggtttatctaaatgtggatctctctcaaacacagttggccctttgtgtccacggcttctgcatccacaatcagtgtggatcaaaagtacaatatttgcaggatttgaaacttgcagatacagagggccaacattttgtgtatccaggctccatggggtcaaatgtaggactggggtatgcttggattttggtatccttggggtgtcctggaaccaattccccatagatactgggggacaactgtagtttgattttatatattatataatatgcagttaatatataatacacatttaaaaattatgtagctttgggtttattgctatatgtaaatgctagtttctattcctatatatgaatatcacaagtaataaagttctcattaatcatttttttaggatcccaaagaatatcttccatttcttaatacacttaagaaaatggaaactaattatcagcggtttactatagacaaatacttgaaacgatatgaaaaagccattggccacctcagcaaatgtggtaagtgtggggattagtatgtttatctctacttcagatcttctttggaactaggcaaggtataaattaaactgttagtttagacagtgactgatttcacttcccactcctgaaaactctaacaattatgtatgctcacgttattttgtcctgtgttctgaaaagctgaaggtaatcacttttaatgaactggaggagctccctaggtaagaacgtcaagtagatccttttttggttaagaatgagcacctgtgaagttaacttcagtgtctcagaatcaaaattggttgtcagttcttccttctcatgctgtttgcagacatgtcagggaaactctgcttgtctggagagagtgatgaggccacctccccgtgccctgcaagacgcagttttaattgacagtgatggggtgccagttgttcttcccatgctggaacagttgtgattctttactgaggactgatgggggaaaggaagaatcacctggggtgcatgttaagccttcagctgctggcatccttggagaatctgattcaggtggtctgggataggactgaggcgtgcatgtgtctaataagcttcccaggtgatgtcttttcaaggaggctgagaaaacactgggctggaaagctgggactcttaagtaggatgctgatcccaatcagtgctgctcttgcctcagaatctgcagtggtgctcattaaaaattcaaattccaggatcccattcttcagattctctgattatttaggtcttaaaaagttcctcatttattttgtttggtgaccattggtataaatgaagtccattatgcttcccatgtcttaagcctgtctttgtgtgaatctttttcctgcaggacctgagtacttcccagaatgcttaaacttgataaaagataaaaacttgtataacgaagctctgaagttatattcaccaagctcacaacagtaccaggtatgtggtatgtgaaaatgaggctctcctggttttgctttttgctttagtaggaaaggagtgaggatcctaagttcataacaccatccttggcttcaaaatttatcttaaaactaattagcctcaatttgaacttcttatctgggagaatggtcctgacctgttctctgattcctcatctggaataccacagcaccttcctcgtggggttccctgcttctttcccacccctcctctagcccaaccttactgctgtaagtctgattatcctaacaagtacagatctttcccatatatttcagcataaagggaaatttttgtttgcttgaaaaagcatccctttagctttttttatataccacacactttgcttctaagttaaatgtgttatatgatcctcttaacagcctcatagggtgctgtacacaatttgtagatgaggaagcaacttgcctgaggatccagagctacaaagtgctggacctgggatacagagcccaggctgcctgaccaccctgcccatgccattaaccaccactctaccatgccaccagcatcaccattttcagtttgtcctcagacaatatacacatctttctttgatcaagcccctgccagcttctttagcaccagcttctgccactgtccacattcccagttacttgtaggtagttctacagatgtcacatcgtgtgattcctctgtcatttctctacccaccagccttcctttagccccatttgtccatcagaacccttgggttactcctgaatgccattcctggaccaggcgccaaacactgagcccccagagcagcctgccctcgccttggtgattgcatttgtcaaactgctgattagctggtttgtcgcctccaccaggctgtgggctccttaagggcagggactccatgttgtattcctctctgaatctctggctaacatccagcctggagaatcgaggatttggccagtggctacctctttgcccttgttttctgttctcttccacactctctctgctctagtcacactggccgtcctgttactcctcagacctgctatacacattcctgctgcatggccatggtgccttctctgccctctgcctggtgccccctatctcatcacgtggtttattctcctgacagccattagagctcacactccctgagagctgcaaggagactgtcctctgtccctttactcacgtttgccattatgctatagactatattttgtccctaagtccatcctctgttactataagagcagcaacttggtggtggttcttatatggtttttcatttgtttggttttattttttgccttgctgtagtatccatactgcccagaatggtgcatatgtagttaagagtaattatttgttgagtgaataaatggcacatcctcagtaaggttttgaatgaaaaaatgactgtactaactgatcaactgtaagattttcccaggtaattctttcaagggagttccaagtataggaactaaggcagctacactggagctttagagaaatgattgtcatatttcctcctcagtcctaaatctcctcttgtcacaggatatcagcattgcttatggggagcacctgatgcaggagcacatgtatgagccagcggggctcatgtttgcccgttgcggtgcccacgagaaagctctctcagcctttctgacatgtggcaactggaagcaagccctctgtgtggcagcccagcttaactttaccaaagaccagctggtgggcctcggcagaactctggcaggtaagtacaatcatttatatgtttacatctacaaaggttttaaaaaatttatttcttttgtttggtaattttgcaaataaatttagggcagaatactctgagacagtcttgttctcactgataaaaattaatttagaatgctttaaaggataagctactacagcaagagtcccagaatgcagtggcccaatatggaaagaagtttatttctctctcccatagggatttataggcccttccgttgtgtggctctgcaaccttttaggcagatggttgtagctgggttatctccacagctgtggggaaggaaggagagtggggagaagttagaatcatggtaaaacatttacctttaagttggaaatgacctggatggaagttaaactatcaccttctattccatctcggccacgccatgtagctggatgggctgtgccctgtaagaaggtaaagatgaatttttggatgggtccattctgttatagacagtaggttgttggaatagccaggaatgaggtggggaaaataaaaggccaaatgtcgaagcattctgaaagcaaaggcagtttagctgcgtcagggacaagggttgcccgaaccagaggcgaggctggtaccaggggctctagtaccagagtggaggaaagggtaaggacacctatgaaaagagatgagcagaagctctggtcatctcagcagtgcttgaagtaaagcaatgactggtatatttttttccctaacttgtaaatattgttgagatctcaaagaaaaaaataaaaagcagtcctaaaaaaattccaaactctatcctgttaaattttgttaaatttatgtaccagtccttctttgtcatttgcagtattctttttttcttgggattataccagtgtatgggattatcacttttctttttctggttattagcctttcccaaatccctccgtttccatgctggcctctttttacaaatgtcgagaattccttatttcaggccttttagttattcgttcggtctccattgttcctttctgctttagaaatttatgatattggttgtttataccttctatctctgttcttggatctcttctattctttacagctcttagcttgctatttcccatgtcttatgagggagtatttctagtttttctcagatgtttagcaaaagtaggtggggagggcagtggtcaaagatgtttgagaaatgttacacactggagtcactctgtgtgtacatttaacgtaggcagtttacacaagagagcaaaagaaaggtaactatttaaatagtggaggtgattttacctactttttttagtgatatatgcactggagtgagcatgcaatgagagaccggaatctaccagctccttcgaaagccttgggttctctgtgcctctcattgtggtttatctcaattgggctgagagtgattctaggatctaaagacactgcatgactcaaacataagtcagctacctccatctagtgctcaaccaaagaaatagtggtctcttactgttaagggacgaagtggtttagtgagagataccaggtcattttcccatatacatgctttggaagcatctttcaaggctaattttggctgtatatgattttcaattcctgtgctaaatttagattctagctgccatttaagataggactctgtggtgtatatacctattccctcacagaaattcagaaagtacatagtttcatacataataaagacatattaaagaagcacttgagctaaagtatctgtttaactttgtagtcaactgctgcttattgtctctacaggaaagctggttgagcagaggaagcacattgatgcggccatggttttggaagagtgtgcccaggtaaactcaattcctcccttctaaaccccccagtcagcaagaaaggtcttctcaattgtatcttagtgatcatgaaagttaaaggaactgtgcataattgttaagtccagagatagtgtttgccccagaggtcttatcttgctggcttgacttggaaatctaaatttagtacatctctaagtttggtgaggtagaatatgaaggtgctctactttaacataccactggtttgaccttggtagaaagtacttaattacatctcaaggtagctgtgctttttaaaattgagtttgccaaagtagaaacaatgagaaaggaccattataaaacaggatcattgaaggctacatactcttggcttttactctcattctccctattggaaatgtctcttttacctcagggacctggaggtacagcagattataaggataagtacccatatgagcatttggtagtattataggatttattatgaaaataataaaactgcagtaacactggccacagactaacagtacacaggtgcacagttgacaccagggattattgccttgtagagttttgacctttgatgagagagtgttttttacagttgttactgatagcacatttatgtaacttaattgtgctttaaaaatatttaattgtctcttgtgtaataacagtaagtgaaagacgataactaaaattttatataattagatcctggagagaatatttgttgggtgattgaattgaaaataccagtgaatgaaacatacctaaaagggtagataggttgggttggaaagatataccacatcgagggttaattaaatggataagatgtcattatctttttttctttgtaaaggaagattaatgcataaaattattttgtgtaatttacatacaataaaattatgtgttgtacagttgtataatttacatataataaagctaattcaccaattttagatgaagaattcagtacatttggacatatgtttgtagctgtgtaaccaccattgcactcatgatctagaacatttctaacacccccaaaagttccctacttccccttttgcagtcagccttctccctccactgccagcctttggcaaactgatcagtcagtaaagtttcacattatctagaatttcatataaacagaaccatatggtatgtagtctttttaatctggctcctttcactcacatagtgcattggagatgcatccatgttgtagtttattcctttgtattgctgaatagtatcccattatatgtatatgtcagaatttgttgatttaccagttgatgtacatttggattgttttcagtttggggttattatgaataacgcagccatgaacattctagtgcaggtctttatggggacaggagtaggaatgccacatcccgtggtaagtggatgtttaactttttaggaagctgcagaactaatctgcagtggccgtatcattttgcattcccctcagtgatatgtgagagtgcttcagtgactcctatactcaccaacactgggtgtattactgtgacactagatgtattatctattgctacgtaacaacttaccttaaaagctggcagcttaaaacaacagaccctattatcccactttttcaatgggccaagaatcttggctgggcttagctggggcctctggctcagggtcctttacaaggctgcaattaaggtattggccagggctagagtcatctcaaggcttgactagtttttaatttcattttctaatgttttattactagtatatagaaatatagctgaagtgttttgcagggaggctgtataattgaccttgtatcctgcaaccttgctaaactcatttattagttctagaagctcttgggtgtattctctaggattttctacatcaacaaacatggtttctataaatatagttttatgtctttcttacaatcaatacttttttctatctgtattgcattttctagggcttccagtgtggtgttgaatagaagtgttaagagtgaacatccttgcctttttcctgatattggagaaaattcacttgtcttttagcattaagtgtcatgtttgcttttttaaaattttattctatattattttatttttgagacagagtcttgctctgtcacccaggctggagtgcagtggtgtgatctcagctcactacaaccttgacctcctaggctcaagcgatcctcccacctcagcctcctgagtagctgggactgcaggaacatgccaccatgcctggctaatttttgtattttttgtagggatggggttttgccatgttgcccaggctggtcttgaactgttggattcaagcaattcgcctgtctcagcctcccaaagtgctgggattacaggcatgagcctccgtgcctggcctgatatttgcttttttttttttttttaatgctctctattgcagagttggcaaactacaacctgtgacaaatccagcatgccacctgtttttgtaaataaagctttattggagcatagccatgctcattagtttacatcttgtgtatggctgctttaacactacagcagcagagttagagttgtgacacagatagtttggcccataaggcctatatttactgtctaatcttttacaggaaaaatttgccaattcctgccctcttggtttgaggaaattcccttctgttccttgttctgagagtttgtatcatgaatgggtgttaaattttgtcaaatgcattttcaactatgaagggttttgtttttagacgagtgatatgggggactaggtgattgattttctactgttaaaccaaccttgcatctctgggttcaaccccacttggtattatagatttattaccctttttctcttgtggcagattagatctactaaaattttcttgaggatttttgtgtttgtgttcatgagggatattgtagttttttcgtgtctttgccatgttttgggtatcaggataatgctgctgtcattgaggggtgacaaaaatgaggggtggtgtcctttacacttctgttttctggaggatttcatgtagaattggtatgagagtctagcttatggttaaaaacctatgtgtgatgtttcagacctgaccataaacaattacagactttacctaggaggccacatggggaaaagctgccctccctacaccagacttggcgtactgccaatgcattacagtttctaaagggagttgcagtcaaggactcagggccccctgttagtcatgctcttgtaacagtatttgcattgagagtcctggcactttcattcttaggtctctctatctgaggccatgggccaaggtcttcttcaggcacctctgccaaggcctgtttatgcaagaaggagtggaaaaaccttgacatttttttccactgtgactcactacccagtacttttccacccttagcccccttcctttgcacccatacccccaagatccatcaaactgctaaagcctttttttccaagctccttcaacagtgaaccaaccctcatgtctgtgtggatccagctgactcttgactagtgagttgttccttgggaaaaaatggaacagagagagttggtgctttccctggttttagcctcttgcttataccaatgcaatgcctgaaggcttaattcatttttgacttgttgctttgatcagctactccaacacctgacagctcagctctttctcccagctcttgggagatatttttttctttaaatgtttagtagaatataccagtaaggccatctcggccaggagttttctttaatgaaagcttttccactattagttcagttactttagtagacattagcctattcaagtttatctgtgtcttctggaatgagcattggtagtttatgtctttcaagtaatttgttcatttcatctaaattgtcagatttattggtatgaagtgtttatagtattctcttattttactgtccgtagggtctatggtgatgtcctgtctttcattctagatattgatgtgtcttcttttttctgattattctggccagaggtttatcaattttattgatcttattaaagaatgaactgtttcattgtttttctctatgatttttctgtattctatatcattctttttttattattttattattttatttgctctttatttttctagtttcttaaggtgatggcttacttttatttttttcttatttttttcttttgttgttgttgtttttttaaagaaacagggtcccactcttgctcaggctggagtgcagtggcacgatcatggttcactgcagtctcaaactcctacattcaagctgtcctcccccctcagcctccagagtagttgggattacaggtgcatgccaccatgcctggctaatttttaattttttttgtagagatggggtgttactagttgcccacgctggtctgaaactcctggcctcaagtgatccctccacctctgcctcccaaagtgctgggattccatgtgtaagccactgtgcctgaccaaggtgatggcttaaagctattgatttgagatgattccttactttatagtttaagcatataatgccataattttcctcaagcaccgttttagttatgttatacaaattttgaaatgttttgttttcatttcctaatttcccttgtgatttctttattgaaccttggcttatttagaagtatgtttaacttgcagatattggagatttgccagccatctttttgttattaatttctactttaattttgttgtgattagagaacatacattttattaatttaaatttataatttattttaatttataatatggtctgttttacagaatgttgtgtgtgtatttgaaaataatatgaaagctactattattggatggagtgttctataaatgtcagttagattaggttgatcatgctgttctagctttttatatccttattgatttcctcactacttgctctatcaatgactgggaaagtgttgaagtctcccagtatttgtctatttctcctttgattctaccagtgtttgcttaatgtattttgaagctctgttataggtgcatacatgtttatgagtatgttatagatgtattcattttgatatccttctttctctgttactattcctaattctgaatttgactttaatgttattaatataattcttccagctttctcttggttagtcttttcattgcatatctttttctatccttttacttttaatctagctgaatgtagtctttattttgaaagtgcgttccttgttgatagcattattggttcttttttttttttaaatctaatttgacaatctctgtcttttaattggagggtttagacatttgcattgaatgtgattaccaatatagttagatttaaacctacagtcttgctgtttgctttttgtttgtttcattgatcctttgtttcttgtttttttctttttttgctttcctttggatttagtatttttcataattccattttacctccactgttggcttattagctatacttcttcatttcagtattttagtggttgctgtaggatttataataaatatcattaactgaccatatcttcagataatcgtatactacttcatatatagtgtaaaaaccttacaagagtattcactccataatactttgttattgcttttgctttaagtgatcaatgattgtttaaggaaattttttaatgacctttcatgtttattctttttttttttttccaaaagattcagtattttccgagttttcaaaaactgctggccactcaaagtggatcaacaaaaatttaagagctaaaactgtaaaactcttgaaggctgggcacagaggttcatgcctgtgattccagcactttgagaagctgaggtgggacaatcacttgagcccaggggtttgagaccagcctgggtaacatagaaagaccttgtttctacaaaaaataaaaacacaattagccaggcatggcggtgtgcacctgtagtcccaacttcttgggaggccaaggtggcaggatttcctgagcctgtaagtttgagactgcagtgagctgagttcacgccactgcacttcagcctggacaacagaacaagaccctgtctcaaaaccagaacgaaactataaaactcttagaagaaaacagggctaaatcttcatgactttggatttggcaatggatggttagaattaataccaaaaacacaatcaataaattgataaattggatttaataaaaattaagaacttttgtgtatcaaggacattgtcaagaatgtgaaaagacagcatatagaatggaagaagatatttgcaaatcctatatctgataaaggtttaatatccagaatatgtaaggaactcctgcagctcaacaacagaaagccagttaaatcaattttgaaatgagcaaacgcctgtaaacccagctgcttggcagattgagacaggaggattgcttgaggctaggagttcaagaccaacctggacaacatagtgagaccctgtctaaaaacatttttttaattagctgggtgtggtggcatattcctgtagtcccagctacatgggagaccgaggcaggaggatcacttggggccaggcagtcaaggctgccgtgagctgtgattatgccactgcatcccagcctgggcgacagagtgagaccctgtctgagaaaaaaaaaaaaaaaagaacaaaaaaaaatttagaagattgctattctagtctactattttttcaaagggtggtcttgttaacaattctggagcccacctaaacctgctaaatcaaacttggtagtaaagctggggagatgggcatgtctaacagacgtttctggtggttttgatgtccaggcgtgcagagagatgatgcttaccttgtgttttgtcattattttcaggatttacaccccttccttgtcttttgtatcaatatttatggagtcatgaactctaggataggcatgatgttgagaactaggagttctcccctggccagggagatagaggcaggtctgtggttagttttgtagttggctgtgatgacatctgacatgctctcttcacttgttgtcttcttcctgttcccttgtcaggattatgaagaagctgtgctcttgctgttagaaggagctgcctgggaagaagctttgaggctggtaagaatcttgtaaatcctctggatgttgggtgctaagcagagagagcaagcaagggattccaggtcagttggaatctcttgtcttctgaggttcatgaaataagtagaaataggtcaggttcctggcttaaggaaaagcggtgtttttaaaatcatttttatcattcttgataataatttgaaatattactgtcttttactgaaatgaattgaatttccttggctgccttgtaggaggcctgtttttcaggaaaatattctgattacctctgaaagtaatccatgtctttctaagtatcttaactctccagtgactagaagttttccttcctaaaattattgtgtttttccttctaggtatacaaatataacagactggatattatagaaaccaacgtaaagccttccattttagaaggtgagggttccattttagatagaattcctcatttggaagaaggtgaggagagagagatgagagagtctcctcctatttactgtgttttcttaataatatgtcatgtagactcaatcaaaattaccacctggatataatatttaattctcactagaatttttaaatatgctgaactattaaatggtaacaaaatatttaaatgttagaaacctgtgatcaaatatgattaagaatctttgtatttggaaatagtaaacttgaatatgaactatattagataataatataacactgataaatttctggcatttaataatcatgttgtggttatataagataatatcctattattctcaagagataaatgctgaaatatttaggaatgaaggatcatatctctgccttactcttaaaaggttccacaaaagtattaatgaatgtgtgtatgcatgcagagaaacaggaagcaaaaaaatgtcaaaatgttagtaattggtaaatcaaagtaaagggtatatgtgtgttcattgaactcttacaacttttatgtaggtttcaacgtttcaaagtattttttaaaagttaccttttcaaatgaagtttgtggttcttagagaacatatgaatattaccagttctagaatactcagatggtcactgtgacctcttaaaagcaaagtggagaaggacatcagtttgacttatagaaaccttagggagtggttgattttaagttctgcatttttatgcacatctaccctgtaagtaacgtctggcctttctgacatttacatgtatgcacattcttaccttgtctgcacccccttcctccatcctaattaaaacgttgctggggtactttttatgtcattcactttaggtacctctaactgggtactgaaaacatcattcctcatctataataatctaaccagctcttacttagattttcaccactaatgagaacctttcttagataaatgccgataattcatctacataggcccaaaacctattaataaaatgcatccttggatagtagtattttgcttttttaaaatgtattctactagtgttatttttctcttgtgtatttttccattggacaatatttattagatacattttttccacatccatgggcattttgatggatgtttagccagaaacatttaggtaattttcttcttatttttgttaactgagctcccctcccctaccccccctttttttgtttgtttgttttgtttgtttgtttgttttgccaatcctcccttgctttaggtatcaagtcttcgttcaggtgattttacaagttcagtggtagcgcatattctgggataatgttgatgaactctaagatctggaatctcagtctctaatttgttaatgcttattaaggaaaaagagctcgcttggaaaacctagtaacctctttctttttgctgaattttaaccctccttcactgctccccgcctttagttttttctctttgcttaaacctcatgctcaaactattttccattctgcatctccagcccagaaaaattatatggcatttctggactctcagacagccacattcagtcgccacaagaaacgtttattggtagttcgagagctcaaggagcaagcccagcaggcaggtctgggtgagtatctgcgtgaaggccatcgacgtgcgggggcagtggggttgggtaacgccacacattgtctagattgcttggtgatccgcctgcaatctgattactgtgccatgggcaagtgtgaggcttctgtggagccccttcagggccctctgtgtctgtgtttgtgtgttggtgaagggcaggaccaagcatgaatggggagagctctgccagacattcccacctacccccattcacccagagcagctgaccacttccgtgtctaacaaaatgagtttcctcatttccagaaaaaagttcaggaaactactgatttacattagtaattactgtatttaatattatctcattcattttgagatcaactttgcaatcattttcatccatcctttgatatgcaccagttgactctagttagttcatttaccgccctgaaagtaaacccacacattagcaggcagtgttttcatcggcttctggttcttcttttctagatgatgaggtaccccacgggcaagagtcagacctcttctctgaaactagcagtgtcgtgagtggcagtgagatgagtggcaaatactcccatagtaactccaggatatcagcgtacgtatcacattgattcagcacattgactatatcctgggcatatagggaaagtggaagcaaatagattggttttctactgggacggtgtagtgggagtggggagaatattcttcagcgctgtgtggaagttgttcagacactttcccagcatatctgagacattaaacttggcattggaaggttttcttcctcagccttgtggcttgtgtgttttcccattccccacgaggcagttcctcccctgaatgctcagtttatattaacatctgattttattttttgaacaaatgttgtgactaaattataggcactgaaaaaatgaaaagataagcttcttcaattcaaaatcaggattggaagagaccataaatgtaaaataagtcataacacttttaccaaatatagtaatttgtcagaaatatttattcagcactcatatggtaggtgcagtagatgttaccaaaaacttataaggagatatgagttataagagtttatagtcttgcttgggatgtgtaaagcaatgcaagattatatattcaaactgaattttgctttaggaatttaaaatggagatctgtgaagttgtgtggggtcatcagcaactgcaagaaagtagccaggcaaggtagcacatgcctgtagtcctagctactcaggaggcttaaaaatatctgtgtaatttctaacaggagatcatccaagaatcgccgaaaagcggagcggaagaagcacagcctcaaagaaggcagtccgctggaggacctggccctcctggaggcactgagtgaagtggtgcagaacactgaaaacctgaaaggtatattctcagtcctgatgatgattcctgaccacaaacaatagtgaataggcagtacagacaggcagagttcagtaggtgattaagctaccattttcccaatttgaggaaagatgagaacttttagcaggaagggtcatgtctgcacacattcctgaagcagcccttcttagctggtaactgagaagccttcctccatttggcatccccctaactgaactgggagagatgcttaggccaggataaagaattgtgggacactgctttctgcgtaggccccccagcgtgcttgattttctttttgtagtacatgtgtttaattattccagcatttgggaagaaaaaagataatgtgggagaaaggacctgcagtgggatcatagaaatttttggctttggatagaagctatgtatgattctgtcaatggagctgggaatataacttaccactctttcaaatttcttctctctagatgaagtataccatattttaaaggtactctttctctttgagtttgatgaacaaggaagggaattacagaaggcctttgaagatacgctgcagttgatggaaaggtcacttccagaaatttggactcttacttaccagcagaattcagctaccccggtaagttttctcagagacggtgtgcatttttttcatcattttcatgggttattgtattcacacaatctccaagtcaaaaagttttcctgttcttaaaacataagatgccatagttaaattatcttagatttatgtgtaagctgtcagtaagatttgatatttgcctgtagagtgactagtataccttggcataggttaaatggactgtcattttcctttctggatgaagtagctgtcatggagaaaatgggaaagtcacatgattgctcctggccttcaatgaggttggagtggggagagatgggggaagatggggtcagagacggcctctcactttcctttcagaactcagggatgggatcaggctttaaagggaccccaggcaattgcttttccttttgttttatgaaaaatttgacttgtcacttctatgttgttatgatggactttgcgggttgtgtttaaggctgaatcagctttgtatcgcagaattctagtatattgtcatctgtttattatttatacctctgttcactctcttatacttcaagtctattgttaagagtttttatttggattcaaaaaggctggtgtatcagtcaagatctagaaaggaaaacaaaagcctatctattattttatcacagaatttaatatatggatttgttaaataagtattagaggactaaacaaggcaaaagggaaatacagaggaaggacattgagatagtaactgtaggaagcagctttaccctctagctgagggaacaggaggagttgttgggaattattagaatttagaagcctggaagtggggccctgtagagctggctcttgaacctctgagaggagggtgccagccagctaatcctggcatttctgagggagctggttccaagcgtacagaagtaaatggaaactggaaggaacagctgctgctgggggaaaagccagccggtcgggccaggtgtggtggtggctcacgcctgtaatcccagcactttgggaggccaaggcaggcggatcacctgaagtcaggagttcgtgactaatgtggccaacatggagaagccccgtctctactaaaaatacaaaattacccgggcatggtggcgcatgcctgtaatcccagctactcaggaggctgaggcaagagaatcgcttgaacctgggagacagaggttgtgatgagccaagatcgtgccattgtactccaacctgggcagcaagagcgaatctccgtttaaaaaaaaaaaaaaaaaagccagccaatcacggaagaaatctagaaatcttttgttcatcctccagctttgtactccccctctggtgttcactgtaggcaggacatgatgggaagccagcagcaaggaagaatatctttcaggtgcccagccccagcaccacaagcagtggatagaagggtgggttggagctgagagattacaaatcagctcagtgtttagaaacacatacgcttatcatgtcttgatttcctcatttagaaatgggcataagacttctctgtgtgcttcaatagaatgctttgaaggttaaataagagggtgtgtgtaaaagcactttacaaaccgttgaaataaaagcaactaggaatcagggccccagaacttcttgaatttattataataggtatttcttagaagaaatgtgatcatcatcttcaaaactgtagtacttttgaagataattgtttttgttttttgagacagggtctcactctgttgctcaggctggagtgcagtgatcaccgctcactgcagcatccaccgccccgggctcaggtgatcctcccacctcagcctcttgagtagctgggactacaggcgcatgccacaacacctggttaattttcaaattttctgtagagacagggtgtcaccaagttgtccccgctggtcttgaacaactcctgggctcaagtggtctgcccacctcacctctccaaagtgctgggactataggcatcagccaccatgcccggcttgaagataataatttataataccactcccatgagtgatcttctcttctgatcacatattcacattaaggtctattttattttatttttttcttgctctgtcacccaggctagagtgcagtgacagtatgatcaatcatggcttggtgcagcctcgaatgcctgggctaaagcagtcctcccaccgcagtctcctgagtaattgggaccacaggtgcacaccaccatgcccagctaattttaaaattttttcctagacatggggagagggagtcttgctgtgttgcccaagctggtcttgaactcctggcctcaagtgatcctcctgccttggcctcccaaagtgctgagattacaggtgtaagccaccatgcctcccacattaagttctaagacatcaattttatgattgtggttttgattggtgaagtatggttgtggtatgtgcaggataccgtgagtgacttctcatggcattgctcttgagagtgtgccaccaagggtctgcactaaccaggggtgtgcccagaggctcgctgcaggcttgaaattcctgcggagtcttgtgttttacctggagcacatgtgcacagtttccattctgctccatagtatgcacatgtttgtatttatttcaacctaaaaatgtttgtttcccataactctttgcgtataattgatactctacgtatttgtagcctcttttactcttttccctttcctcagggagtggtttgctcatttagaaaaggccaagatatatcactgtagagtttcgtttcttttcttttcctccaccccccatctttaccttgttctgggagaaaggagaattagaagtctgagttgcagctggagaaactggcaaattaaaatcacattgggaaagagaattactgtgtttcacaccataccagtagaaatgacaggctgttttctgggggtagggatttggcctttggtattggcagtcttgagaagtattagataatctttgctgatacagtctattttctcctcaggttctaggtcccaattctactgcaaatagtatcatggcatcttatcagcaacagaagacttcggttcctgttcttggttagtattttttctcatttaatattacaatactaagcagaaggactatctttctgtaagtattgagaagatcagcagtataaggagagattggatacaatttttcactacaaaaaattgactacaattcttcctcaattctaagaccgcatctttagtatgatcagtttcatgcttctagcggtgggggacctggtgcaggaaaatccagcatgaccattgtatgtgtaatttttaaaaatatttatgtggcatatgcttgttcataaaggcacaccacagttccagtttcagtctaaactgtctacatttacatatacatcaaaagattcttctgaagcatcattactggctattggcagttatgctttgcatcttgggggcattttcataaaccttgcttatgagtgggacctttttattatgtttaggattgacaatataatttgaaggcaaatccaaagaatattagcattttatacatatttcctgtttagttatgcatgaagtgttttatttgttgaggggagatgattctcaattagattacttatatccctaaaaattaaaaaccctaagcgctttcttttgaaagttggttagaaacatttgatgagtcagcttgggactttcagtatttgcccttacttatagttggatcaatgaagcatcttagctttgaaaagtgaatgatagtttctaaaataattggcagttttaactgctattatttgcatttctagcatgtgacaagcaactttctgaaattttttttcaccgaagtgctacactgtaatagcattttgatgacatttgaagtagcctgtggggattcaaattaagtttgactttaacagcttatgttgctaccaggaagaacagctaccttccatcccagctaaactcatacatccagactgtaactactgtattcctagctcctcttctgtctagagaatggcaaggttcttttggtatcagtttcgacatatccacttattcctttttttttcttaagttttttcatttagaaaaaaaaacagatggggtcttaatatgttgcccaggctggtctcagcctcctggtctcaagtgatcctcctgcctcggcctcccaaagtgctgggattacaggcgtctgcccctgtgcccagcccacttatttcccagatgctaggaacttacattagacctgaggccatttggtcattgtttattttgtgctgtagtccaatccagttgtgatttctgcctcctgtgttcctcgttgctggcctgatgctgaccttcaggttaggtcagtcccatcattccccagggtattctagatggctttcccacttcaaagagcactttcttgttttccagctgagccttaaagacactctgtaatatttgagagcccctcattatctgagtgtttattatcattacccttgtggtttcaaggatgtataggaaaaggtaagttcctataattcaaaaattgccactgatgaactaatcacaaaattagtgccactcaaatattactcagctgcccctccccagctaacaatagttaagtatattggcacatccccacaagtgaaatcaatgacttgatgggtcatttctgattgtttcctgctttgatgcaatacaatatcatgcagatcaattgcaagtcttgcaaaaatttagtattacataaaatagattaaaatgatattggaaaagtacttgaatcacagctgggttggacttgttgcaattgatgacaaaataagtgcttcaaatgattttgactatcaaaggattgagagaggtccttagaaaaattgaaaagccctcaagttatttttataaaaatggccttttttgtgtgctgtgaaatccacatatggaaatgtgaaatatgtcatgtcctgctgtcatataatttgtcagaataattactttcttgcccaaaagtctgtactttgtgtttatttcaagttaagtctagaatcaaatatagttgtagttatgcctaattttaaaaaatgagatagagcacattatttttgtaactagtttttttttttttttttttttttttttttttttttcagacagagtcttgctctgtggcccaggcgggagtgcagtggcgcaatctcggctcactgcaagctccgcctcccgggttcacgccattctcctgcctcaccctcctgagtagctgggactacaggcgcccgccatcacgcccggctaatttttttgtatttttagtagagacggggtttcaccgtgttagccaggatggtctcgatctcctgacctcgtgatccacccgcctcggcctcccaaagtgctgggattacaagcgtgagccaccgcgcccggcctgtaactagtttttttaagataaagtcttattccaactttaattggaatttatgaaataccttgttgatagtgaatttatttaagtagccttttttcagtattgatattcttatatctttatggcaccatttagtggagagaaatgtaaacaaacataaagatgtagtattaaatcataactgcataaaattaactgtagtatgtactgcactactgtaataattttgtagctacctcctgttgctattgtggtgagtgagctcaagtgttaccaatatctgcttaaaatgccatgtgccgctaaccatctccacatgagcagcacatgagagtctccattaattgcatatggcagcgaaaagtgatctcttgcattgtcgtgtattttttatcacgtttaatgtaatatcgtaaaccttaaataacaccatgagacctataggaagtaccacaagtgttgctcccaggaagcagagaaaagtcataacattacaagaaaaagttgacttgctcgatatgtactatagattgaggtctgcagctgtagttgcccaccacttcaagataaatgaacccagtgcaaggactattataaaagaaaaggaaatttatgaagctgtcactgcagttatgccagcaggcatgaaaaccttgtactttttgcaaaatacctttttatgttgtattgaagatgcagcttttatgtgggtgcaggattgctatgagaaaggcatacctatacaactattatgatttgagaaaaagcacagtcattgtatgagaacttaaagcaaaaagatgaaggatcaaagctggagaatttaatgccagcaaaggatggtttgataattttagaaagaggtttggctttgtaaatgtctggataataggaaaagcagctcctgccatccaggaggcagcagcaaaggcagtcaggtttatgatcaggactgcccttatctgtaaagctgctaacccccgagcctggaagggaaaagattaacaccagctgccaggcttttggttgtaccatacaacaagaaggcttggacaaggagaacactttttctggattggttccattgtcgatttgtccctgaagttaagtagtatcttgccagtaaggggactgccttttaaagttcttttgatactggagaatgcccgaggccaccccaaactccatgagttcaacaccgaagacattgaagtgatctacttgcccccaaacacacatctctaattcagcctctagatcagggtgtcataaggacctttaaggctcgttacaaacagtactctatagaaaggattgtcaaatgtatggaaaagaaccttgacagaacatgaaagtctgaaagaattacaccatcaatgatgccatcattgttatagaaaaagctgtgaaagccatcaagcccaggacaataaattcctgctagagaaaactgtgtccagatgtgcatgacttcacaggctttacgacagccaatcaaggaaatcatgaaaaagattgtggatctggcacaaaaaaaaaaaaaaaaaaaaaaaatggtgcatgaaggatttcaagataggaatcttggagaaattcaagaggtgatagacatcacaccggaggaattaacagaagatgacttgatggagatgagtacttccaaaccagcgccagacaatgaggaagattacataaaagaagcagtgccagaaaataaattgacatttgttccaaaggttccaattattcaagactgcctttggcttcttttacaacatggatgattctatgttatgggcactgaaactaaaagaaactgtggaaggattggtaccttagagaaatgaaaaagcaaaaacatcagaaattatggtgtatttctgtaaagttagtgacactgagtgtgcccacctctcttgcctcctctttaacctcccctacctgtttcatctctaccacccctgagacagcaagaccaacccctccacttcctcctctacttcagcctactcaacgtggagatgacaaagatgaagacctttatgatgatccacttccatttaatgaatagtaaatattgttttctttatgattttcttaatattttcttttctctagcttactttattgtaggaatgtagtatataatacatataacatacaaaacatttgttaactgactttttatgctgccaatacactgccgaacaacagtaagctattggtacttgagttttggagattcagaagttaaacatggggccaggtgtggtggctcacacctgtaatcccagcactttgggaggctgaggtgggtggaacgagaccaggagttttgagagtagcctgggcagcatggtgaaaccttgtctctacagaaattagccaggtatggtggtgtacacttgtagtcccagctacttgggaggctgaggcaggagaatcgcttgaacccagggggtcgaggctgcagtgagtcatgatcgtgccactgcactccaacctgggcaacaaaatgagaccctgtctcaaaaaaagaaaaaaaaaaggtatatgcagatttttgactgtgcaggggggtccgcacccataaccctacattcaaggatcaactgtaatttttcatgcctgcatggctcatatgtacagatttactgctggaagtttatcataaataatgctgaaaaagaaaatccttatatatacatattttctcctatctctgcttgcagtatatgattcctggttagaaaagaaacttaacaaatctaagtgaaagagtgcctgggagttttaggttacaatgacagaatcttttcctaaccctctctctccattcactttttttaaagcaggggcatctttattgatcaacatgtttgtcgaagtttcatcataaagtagttcctgtccattaacttcacttactgaatatgtgctatcacattttgctattccttaaaaattgagctagactttacatatagtgaaatgcagagatttcaggtgtacaatttgatgagttttaataaatgtatacagccatgtgactgctgccaccacccctcccaccagtttgaaatacagaacattcttccactttgaatcactgggtgagcatgcctgaggttgaaatgcagtccctcctctcagggcggggcctccaggttgtgtttgctctgacctggaggttgcaggggtagcagacacatgaactctggctctgatggtcttattgctgcaaactccacctgcctagtttgtttagtttagagttactgcctcagcgccctccaacaagagtatgtctgtcacaatttcccttcctttcttgcttttagatgctgagctttttataccaccaaagatcaacagaagaacccagtggaagctgagcctgctagactgagtgactgcagttaggagggatccgacagagaagaccatttccactcattcctgttgtcctaccaccccttgctctttgagggctggctattgagaactggaaagagtaaaatgataacttaccttagcattgccaagaacttcagcagacaacaagcaattctatttattttatgttgtgtatacatcttgatcattagcaagacattaagctttaaccattatggcaccattttgtgagaatgattgttctttcacttgggctgtttgagagcataattatggtaatcatgagattaatgtttcatgatttctacctccaaagtgtgaagacaagtaaaacaatgtttctaaattgtcttattttgttggcggagaagattacaatggctattagtgctacatttggtcaaatgtaatcacttaaatagcttcttgtcaccttaaactaaagcagaataaaaagtatcctttg

SEQ ID NO: 15571 - DNA, 71913 bp, Homo sapiens; identical to SEQ ID NO: 1177

SEQ ID NO: 15572 - DNA, 51310 bp, Homo sapiens
acaaacgagacccagacttccctcaatggggtctaccagcccccaattcacttccagaacagtgaattctatggcttctccgaattctactactgcaccgaggatgtgttacgaatggggggagactacaatgctgctaaatttactaaagctgcaaaggtacccttgagagacgccgtctgctctgcatgcttttgagagaccagtgtggacggtgacgggttatgtcctcctttcacattgacagggaaagacggagtatagaaggctgcactgcagcatgttgggatcctgttccctttgcttggagggaggttgaatagtcacagcagaagtaaaaaatgtactgtacgctgacttctgcaccactccattagctaccctggtcatcagttagctccaaattacagtcttttatgtcatttttgtgctttgctgcatgtgacaattctcctactagccttccccctccctgacctgccaggatactcctgttcttgtgttctctctgccttcctgacaccccttaaacttaggtgatgccagacttccacacttggcccctgatcttcaggttcttggatggtctcatccatattcagggtttgctgctgcctctcaagaagaggctccaatcctgacccctgcccggttgcctgctagattccacaactccagacaaacccaccatcctctctccattctgttcctgttcttctctcggttaatggcatcgccaaccatccagtccccttccctgcagcctaggagtcatggacttctccctctaaccatttcatctctccctatacaccccagtgtaatcagtcacaagtgtggtattttatcttccaagtatttctcaaacccatctcgaagcgcagagcactgtatgctgtaatcatgtcagacagctggcttccctcacgctctccgcgacttctctgtgtccatgtccatgttcctgaagtgcctatgccgagcccgttccccaggccaagtgctttttccttgtgctccctgtcacacacccaggcccatctcccacctctcagcagtgtcttcatcctttaaatagaggtcgggatggtagccacctcgaggagttaagtattacattgagaagacacacttacacaatgctcaataaaagttattataacaaataacttcaagaaaagtgggatctctttcccttctgttaaagacaaaaaccttttgcagttattatcccagtagcttgtactgtgtcctccacagatgtaggacttagtttgaagtagctaaaatactgcttcacttttccaaaaatgtatgcccgtaccatgcagtcatggagggagaaactaaacagttttggagaggttggttgtggacagcaaagctctctttaacaataccctggacagaattttaaggcaaggcattgtgtttgcgaatcagtaagtattccctgagtgtttgtgtgtcttgccatttgttgtataagttaagcttgtgtgtttcctaatgggaaggatatgcttgttacaaatataaatttggtaaaccatttttaaagtgagaattttaataagcctttactagtgatctattttggtgaatttgttttcaggattattgtgcaacaaagtggtccattttgcgggaacgctttgaccgaggactgtacgcctctcatgctgacctccacaggcttaagtaagtactagaaggtcaagcccagggcactcttaagaaccataatgcagtgttggccccactggcttgccacaccctggcctcagtccagcttcttctcactcactgttcttcccatctaccctgggcccctttcaaacgggacaaatacttgtgcccagacatattccgtatcttttttgttttggtcacttttactgtctcttacccctgaaattcccctgttcatacctttgcttgttcaagtcctgcccagacatcagagtccagccagaggctgtccctttccagtcttcctctgtcccctcaatcagacttcatccctttctctgagtctcaagaattcatcctacctcgccaatgcatttatcatgttctgctttttctgttgctttttaaaaatcccctttcattgtaagtcacttaagtgcagacactgtatcttactaattattgtatcttattacttgcttagcacagtgcttggcaaaaaataaacctctaataaatatttagagtcatagaatatcagagctgaagagaaccttcctaccatctcattttataataaactgaggtacaaagaggttggaacctgttcagtattcattcaaggagtacatggtgaaatgccagctggaaaagaaacctatctcagggatatatgacattatgccgagaccgggttcatgcactgattgatttgacaggtgaactgctccatgttgtgggaccagggatgtgaagcaagtacatcaaccttgaaacgcgcgcagttggtttgggagagccggcctgaggaagcccctgccccaaggctgcccacagagggaaggattgtgtgtgtgtgtgtgtgtgtgccatcttgacagagtgagtcagtctgacttgcctttgtgcttgccgtttgtaggtatcagtgcttcaaatcggcctggatgtttgaggtgtttcataggggcttttcgtttcctgtcaactataaaagcttaaagactgccttgcaagtttacgacaaggaggttcagtggacccttggagccatcctctacaggacccgctttctaccattaaggtagggctgtgaatttgggaacgagaatcaaaaagatgcttttctgcagttacagcacctcatggcagctgtggtctgtggctgtttggggcattgctgttagagccggccacggcagaattgtagggacagtgacgtttgcttttggtcttgccccctccccacaagtgcttcctcccttctcaccctaccatcccgtaatacacagcactcctgtcctactgccctgtgtttggttattctcaactgtctgttccccagccccggcaaaagggtcagttccggggttcttaacctttatgactcaggcctcttctccaaatactgtttaaatgcatgtataaatacataggattacagaagaaaccatcatattgaaataataccaaaatattacagaaaacaagtttgtgatactgtaatatgtgttcttctctattaacacattaaataacaggatctggcagcagaattagcactttctgtaatttcagtgtagtcaatgagcgtcaatgatattttgaggcattgatgataccataatgggacatgaaagatctgtgattttcgttagtaacaaagttgcaggtgctgccaacgctaatgatagtttgttgtctgcattcatggtcaaagaaatgctacatctcagtcagcgcttgggtagaacaaagatgtgcgtttttccccattcacgtttgcagatctgctgtcagttgacctgtgctaagaacctgagttacctgatagatgagacatttgctcttccccccaccccctccatttaattgagcatttctcagcaacccttttaactgggttaactgtaaaaatggtgagtcatgggtgttactgatcacaagcatgcagtttgtttacatgttgacttctttgtatcagcgaaaccttcacggctcttctaaattcctctgattttggttgcccaaattataatgaccgacttcagagtatactttcacatgttatctcactgatacttagaagccccctgcattgggctgttccgttctccatttcagaggtagggttgcagttcctaaagtgcagctctggggcctgggtcccgccgtccccctgtgcaccctttccacccctttccttgcttactgtcctgtttgttgtttggtgttcacatgggcagagacatccagcaggaggccttccgagccagtcacacccactggcggggcgtttcctttgtctacaaccactacctgttctctggctgcttcctggtggtgctgctggccatcctgctgtacctgctgcggctgcggcgcatccacaggcgcactccccggagcagctcggccgccgccctctggatggaggagggccttcccgcccagaatgccccggggaccttgtgatccagctcacagctccacgaagactcaaaaggaaaagccatttttgcctcagggtttctcctctttattttcctgtggttttgttttttctttcccttttttgttcctccaaacaaaaacaaaatgcaggccgagcgcggtggctcacgcctgtaatcccagcactttgggaggccgaggcgggcggatcatgaggtcaggagatcgagaccatcctggctaacacggtgaaaccccgtctctactaaaaatacaaaaaattagctgggtgtggtggcgggcgcccgtagtcccagctactcaggaggctgaggcaggagaatggcatgaacctgggaggcagagcttgcagtgagccgagatcacaccactgcactccagcctgggcgacagagtgagactccgtctcaaaaaaaaaaaatgcattgtttataagccctgctgtctagaagtattgcgtttagccattttgagtacagcattaaattgaggagtggggaagagggaaattcacttgatttttgctgcacaggatatctgccaaaaataaatgagatttctggggtttctctaaggaatgttaaatttaaacacatgcactttgatactggagggaggtggaaagatgcattctgtcagtggagaggggactgaatagtgatgctttcatagaaccaaaaaacttactgcctgaaatgataatcctcttttttctctatcttgaaagctctaacctgaagagggtgatttttttttttatttattgttcaggtctgttactgtatatgttttctttgcaaatttaaattttttaaaccatttatatccaaaacagagaaacatgggcaccaggagataaccatttataaaagtgatagtgaactatcgactacagctttgtgcgagtgtgtgaaaaatcccaagaaaccagcgtgaggggaggcaatgctggttctttaaaaacacacacttcagaatttactggtacattttatttagaaaaatcctcgttactgttatcttttcctgaccgcaggtaattacgctccttattccatatttcagtggcattagaacactgtggttttgaaagaattggaaattcctagtttcaccagtttcggttttattggaactagagcacatgcccacttcttgctcagtattcctcagtgtttctgcttaatcgtgcctcagtttcttccagcttccaattggtgtttcccccaccccccttaattaaaagtcatctcagcttttaatcgtactgggagaccccatgcacagcctgccgagtcctcttcctaaccgcattgactgaggctgttgctggcagcaccactgtaaatccagaagggaagagtctgcatccaatacaggaaataaattcacattttgaaggaaaaaattcgacaatttaagccaaaatctaaaaaggacaattggattggcatatgtgagattggtgttttttcacctatttatttagttgagaagtttggggaattctcgtacagtttttttaggtggagtttgttttgtgcgagtgtctgtgtgtgctgttccctaactccagaacagttaaattcctgtagttggtagcagattagtacccagaagtggggttgttgctataacagataactgaggatattataaaagtggctttggaactaggtactgggcagaggctgggagagtttggagaaacaggagagaaaaggcctgtattgccatgaactgagcattaggggcagttctgctgagggatcagaagagaagaccaagggaattctgtcccagttgtggctcaaactgcctcaggtgcagcttaacctgcgtctctggaaggtaaaatgcatctgatccttgaggcaagagctgtgggggcatggctccctcacctggatttcaaagcgtgttaccagcagcctggggacccaggctctgcctctggatttacctgcatcgtatttgcgcttcgtggtcaaagttgttaagaaaggggtgagcttctggctacctaataagttggtcttggccacctgcctgcgacacttcctggaggagccatggattattggtggaggctgcagggagctggcgatggagccactggtgtcagcagcagagagggaagaaaggaaaggaaggggccacaaatggttgaagtgggcaggtgggcacccagggagttaggggaccccgccttccagctctgggcatagaagagttagtcacatacctgaggatcctgaaacaagggctgagaaaacctcattgctccagctgagaggtagtagtggatttgccatttttaaacagttgcctaagaaaaaacgttgaagaatatgcagcagacactatatgtggcctgtaaagcctagaatatttactaaaatatttacagaaaaagtttgctggtccttgtgagaacaatgcagttcaaaaaaggatacagacagaagcatcctcttaaatcaggaatgtagtttccatttgtgggcacgaaaagatggacaagagaagtaaccaaacttcaatcttaaaatatttgttgcaccagaatttcacttcggatttttccgtctagattattttcaagatgagttttgaaacaaaccaagaaacctgcccctcacccaaaattgtttaaaaagagaccactcaagggagttcattatgccgtatggagatgtctgcagtcgcagcaaatcacattccagagaaggtctcgcgtaggtgaagacagccaggtgctttctctaagagatacagggtgggtgagagacaagccagggaggatcttaattcaagagaagaattcataccaagagctgaccaagaaggcagtaaattctgtgtacttgtagcagaagaaattggactaggaacttgcccaaagctttatcaaagaaaagcattgtgttcaatcttggtagaaacatgccagcaataagtgcttatgttccatagccatatcatgggcttctcacttttaaacctcctccaggggatgttctcagacatttcacaatccctctggggacattacagtagaagagaaacacatggaactgtaccagtgctttttgcccatgttcatcctaagctccggctttaggcagtgctttctgacctgggcggagtgaagacgctgctggtggctgaggccagtaacatggggcccctgcccagccaccctgaaggctgggtaggtccctcttttcaccaccagttttccacatctgtgtactctagattaacaaactctggataaacagatatttacattttaaactcaggcctacacagagtagttttccttataaggagcatgtatcacttagcaagaaactaaaaatggcaaatgagtttttcatcctttaagaaaaaaatcagctttagaattctctgcggtcagttgtgtgcaatgcaacaaaactacctttcagtaaattacttagttatttatttcagtgttttgtttcttttgatactaagtttccctttcaataatgaatgatgtgaccaaccaaggagaatttgtttgttctgtactaaaattatattttacagttaggaattataaaaagcaagggagcatctttaaatgttttttgtttaagcgatgtcttccatccaaagtaagaataatactctcggaaggtccttttggtgtcatgtcacttgctgtatgtggcagccttacagtgccacacttgggtactgaaaaatcaataaaacgaaagttcatcatcccatggcccgtagactgtgtgggcttgcttccttgtcatctttgaatcttcttactcattagaatgatgagttgaacttgagtccaaattcagtgaaatacattgtctgagtctgacgcacactctttgcatgtgttgtgttgggtgtgcatacagtgaagcacaattgtgtggggttgtggagagggcgtccacactctctgcagctcagaaagcagatatttcacaagtagtgaccaacccacgacgttaagccattcaccaacaataattgccactctgagatgactgtttataaggtcaccattttaagtacctacttgtatatagacaaggaaaagtaataaaattaaccaatttttatgtatttaatagtaacagcaaatgctgactttatgttacactgttttgcagttcgatctaagcttagaacctttggcttacttccagaaaattatgactgtcattattaatgttacgtgttaccaatatggaggatgacattagacgctcagcatgtttctcagccgttggagaatacatagatgttctcctggagcaggaaggtgggcctgagccataacctgaaaatagatgatagagacagatgggaagggaaggggaccagctgttaggaccaacaaaaataaaggcctgagacatgccggagaggagagggaagcgcaaaaacaaaatgagagaacagagccagcaaagtgagctcaagggaggtcctcaagccattgatcgctaggaaaacaggacacagcattaagatagaactgtcgtaaataatttttgaggcagtgcaatgactatagggctttttgcctgactttaaatacgttaaaatatctaagatgttaaaagacatctaaatttttattccacttggtggaagagaagtcagtgcctatttccaacactaaccatgttgacaggtctgaaaagccatggttctgtgtttttgttttcagtctgtttccatttgtcctatgaattggcatgtgccctgtgggtttttttggtttttttgagatccggaaatgctaatggtttgcacagagggggtcgtgaggtgcaggtcacctctgtcagagtcacagtgtcttcttttggaaacgtcatgaaaagacaaaggagtgcccggctaatcccaaagcacgccttggcagagtggatctgcctggagcatccatccgtggcagcatgaaaggcaatcctgtgagagtcttcctggccccacctcgtctgggagcatgtgggcctgtgatcccacctcctcctaacaaaagaagagtgtgtctgttgatgtgttttattttgcttttagccaggctagtccccctgcccttgcgcagtccagcctctttctattaatagatctattaaggttgactgagacctgctgcaggggacgctaggggcactttggccttcgatctttgcctttcacccttgacactgtttggcaggtgaacgacatccgggctccagacttcatggccacttcaacatttctgtcaacagcctgtgtctgtttcatgtaagaggcccaaacaagaaaatcaaggcttaagaaggatttctgccttgagtaaaggactgaaacctcctcacagaacacgatggtgacaggcacaaaagacagacttcttgtttaagtaggtgaactccaaagacgagagaaaaggagtttttttcctcccgttcaaccagtcatcaaataaacatctcaggcatctggtgttttgtcaagggattgggattccagtggcccctgtgtgactggaaggggaaaggtttgtcggtggcaacgccatcgaaacacaaaggagcagctttagaatccccagtgtgggtcttctcttgtgttatttctacaacatccttgtgccagctgttcttgctgttctctcaggcttctaattgggagtgtgaatactacctttcaccctttttgccttcatgagaatcagagtttgaagtggacagttctgaaaatattaatcatctttttttttttttttttttttttttgagacggagtctcactctgtcgcccaggctggagtgcagtggcgcgatctcggctcactgcaagctccgcctcccgggttcacgccattctcctgcctcagcctccctagtagctgggactacaggcgcctgccaccacacccagctaattttttgtatttttaatagagacggggtttcaccgtgttagccaggatggtctcgatctcctgacctcgtgatccacctgcctcggcctcccaaagtgctaggattacaggcgtgagtcaccgcaccgggcctaatcaccttattcttgcctgtcattacacaagccttaaactccagggaccagacttagcactttcttttcctaagattgctttttctcccacttggcccaagctttaatacccagattttagactcaaaacacttaaaacatttggtgggctctcctcagccttgtaaagttctttgatactggtcatggcagcacaagagaattttctggaagttcctggctgtttaatgttcaaattacacgtttaaattctctcccacctcccgtggccctgttttccatcagtgtatctatttctggcccaaatgtccttgaacatggaccatgacaggtcctgtgtttactttccatgtttctacatttataatccagtaaagaagacaccgagtagtacatagtattttgtaaatatttgtaaactaatgaaaatctggtttctttcacaaatcacctctttaggtttctaaaatttatgaaagaaatcttttaaaatctattctaggccgggtgcagtggcttacgcctgtaatcccagcactttgagaggccaaggcaggcggatcacgaggtcaggagtttgagaccagcctggccaacatagtgaaaccctgtctctactaaaaatacaaaaattagctgggcaaggtggcgggcgcctgtagtcccagctactcaggaggctgaggcaggagaatcacttgaacccaggaggcggagtttgcagtgagccaagattgtgctactgcactccagtctaggcgacagagcaagactctgtctaaaatatatatatattttattctcaatttttgctgttctttccagatgtgcagagttgtgtgtggttttaaaaccatatgcaatgtgccgtgaagggcgggatggaacccaggcctctgagtctcagttctctgttcacttccctccaccagagtttgttaagggagtgttgcattttaaagctttatttagaaaaacttaggaaaaccaagtttacctcaagtggtttccttttttcgcaacctgttcagccttgacagaaaggaaaaagaaatcccagaattaggtagtaataatagaggcaaagtgagattgatattttctgaagccctgcttacagaaaataattcctgcatatttattttattctaaacatagcttcagattgtttttcattctaagttgtccttaaaagtcactttttaaacctcacaagaagcaccaaatgtaagggggaaaggatggatttgactacatctaaagtaagactttctgttcatcaaagctaacagatggcagactaagaaggtatttgcagtgactgaaattgaaaagggattaaaatgtacaaagtttcatgcaaaacaacaagaaaaaggaaatccaaaagaaaaaaccggccatggatattaataggtgattcacagcaggggaaacccaaatggtgaacaagagataaactaagctgaagaaatgcaaatgtaaattaagacccactaccttatgcccctcagaattgccagacttcaagtgctggcagtgatgcggggcctggacttcaatattgctggtggtggtgcaaactgcaatgcgtaccccagaagggaagctggcagcttaaaagttagcagcgtgtgtgccctttgattcagagagccacttgcgcgtggctctccggagagatttctacctgggtccatgaatggacttacggaaggattccttggtaatgattctgagtgactgtgttgatggaggcaagcaaggtcttggacaagtcaaaggcggcaggtgcgtaccatggaatactgtatagccatgagagacagacctagaactatgaacagcaagcgggtggctcttaaaaatagtgttgaatactgaaagcaagacatgagaattgttgtataatgccattatgttaatgtagggcatacggcactgtatgtcctatgaggatgtgcatattttgattcaaatacattaaaatggacgttatggggacacagattatttatgaaaggaggagaaaagataaaactgatttccttgttttagggtgacctcacatcccagtgagcccctcaattcagggccagggaggttgattggttaccccaccccaacccaacccaggctgttttcagcacggcagcctgataagctgtgattcagaccttgaagttgttaggcaaaagctctccactcggctctgtatttgactcaggaagaactgaagtctttataatggcctagacagccctgcaccgtggcctcccactccacacctctctgaccgcagtcctcatttctccgagactccgctccagccaccctggcctcagggccctctcaggactttccatccccctcaccctgcttcactttcccccatgatgcttatgaccttagatctagtacactctgttttcattacgttctatgtacgactctccctattaccctactagaacatgagccagggggcagggggcttttgtctgtgtgttttcatgttgtatccccaggcacaggatctgataggcggtagacattcaataaatatctgtggaatgaatgaacaaggcaggatccttaaagcgagggggaatgaccaggctgagaactgagagagcatgctaaactccacagtctggccccagggatgggggcaggaaagatggcaccacctccttgctttattagagggaaagaaggtgcttcttgtgcagaaccgtcatcataacagaaagatagcttattacacgccaggcactgttctagctctttgttagcttacataatccctgtattagttcgttttcacactgctataaagaacttcccaagacggggtaattgataaaggaaagaggtttaattgactcacagatcagcatggctggggaggcgtcaggaaacttacaatcacggcggaaggtgaagagggggaaccaagacaccttggcaggtggcaggagagagaattaatgcagaaggaactaccaaacacttataaaaccatcagatctcctgagaacactatcacgagaacagcacaggggaaaccactctcatgattcaattacccccacctggtctcccccttgacatgtggggattgtggggattataattcaagatgagatttgggtggggacacaaagcctaaccatgtcagtccccaaaatgacaccatgaggaggtgctttgattaccgtcactttacaggtggagaaacagatgtggaaaaggcacacaacttgcccaaggtaccgaactagccagtggtggggctgggatttgaacgcaggcagcctggctccattctgtactctagagctgcactgtccagtatgacggccactagccacatgaaacaggccaatctaaactgagatgagctgtaagtataaaatatacaccagatttcaggccgggcacagtggctcatgcctgtaatcccagcactttgggaggccaaggcgggcggatcacgaggtcaggagattgagaccatcctggcaaatatggtgaaaccccgtctgtactaaaaatacaaaaattagccaggcatggtggtgggcgcctgtagtcccagctactcgggaggctgaggcaggagaatcgcttgaacccgggaggcagaggttgcagtaagctgagatctccccactgcactgcagcctggcaacagagtgagactctgtctcaaaaaaatatatatctatatctgtctgtctatatatagatatagacacaccagatttcaaagacttcatgtaaaaaaaatatgaaatatctcagtttctttacattgggtacatgagacatgacaatattttaggtatattgagttaaataaaatattattggattaacatcacctgtttccttctacctttttaatgtgtacactagacaactctaaattgcctgtgtggctcacagtatatttccgtcagacggagctgctctcggtacttgcttctcaaagtgtggtccttgaatcagcagcatcaacatcactgaagcctgacggaagtgctggatctcaggcttggtctcagacctcttgaatcaaattcttcattttgccagccttccaggtcactcataatgcatgctcacatttgaaaaatgccgcttcagaccaggcagcaatttttttctctaaagggccagataataaacattttaactttgcaggccacatgacttctgtccaaaactcacctcactgcttctgtagtatgaaatgagccagaatatgcacgtgaatacggattccactgtaacctgcacggacctagggggactgaacaaagcggggcaaacacgggaataaaagacaagagacaaaagagtatattttgaagaaggggtcagggggtaccttgcccctagtggacaagggccctgagctttatacagccctccttatttattaggcaaaagagatagtgagaagcggggtggaagaaggggtcagctgctcagtctagagcaggcttgcaagactgcattcctcgaacaacaggctaaatgttgcagtagataacctcagcgccagggagtgattgcctccagcaaaccttctgtcggcaggagcagtcgtcagttttctcacatcctgcattcatgataaacagtttgctgttggatcatatagcctccagtggaatgctgcgttggtcacatcccatgggccttcggctccctgcatatccccctttctgtttatgaattaattgaaaaaatgtaaggccaggctgggcagctctcattctccgattggcagtccatccgattttacagactataaacagaagacagagacgaaacaacattattccaagaactacatataagatgttaatgtggtgccttagataggtccaagggttgaggctctccaggccttgctggaatttggtcccgtcttctaaagaaggctgaaattcttgagtttgcctatttaaatcaagaattttgttttgtaattcaccaatatcaaaggtgatgttggatgtgaacgctccctgcaaatgggctttcacaaggtcccacggatactcactttggttgtattctaagttggttacacaaatatgagtgtgattaaaatgacagcgcaattactgctgcaactgcaagctttgtacttgtgcccctaaccacagaaccgtggatttcagcattgccacttcagtttgtagctcagtgttaattttattctgaagtcgccacgcttggtcagctgtgcgcgtccagttctccacgtactgagctatttgaatagaattatgcaaagctacagaagatatcacaacagaagttactagcatgaccaagtaaacagtagcaaaaattatcatgcctaaggctctacgggcacgatgagtcagctgagttagaagtttcacaaaatgcaaagcaggtgtggcagcccaaggctcagacagattaacaggaatccctagcccagggataccacctaaaatcatcacagtagagatattatgtgtttgcaatgtgctatgattagtgcagtgatataactggcaagatttacaggtcaattgggtattgtttacctggagctggtccttcttagctgccaaaaagacataaggattaaaaacacaaactgtaaattgagtgatgatattctttacaaatgtaaccttagaactgtgttgtgactccggtcggccttctctccgtctttgcattcaggctcagctgactcatggctcataccgggaccgggtccatggttggccaccctgggttcctccagtctcccattccatggtcgcacgcaccttgagggcacccacacagttcatccatctcctgcaaaaacacaagtataccctcttccccacattagtaaatccactggacctttccattggccttcttccggggatttccgtaacactttcggataaactttcctcttttcctctaacacttgccaatgtctttctgctggagtctttaccttccataccaggagtcagaaaatttaaagtaaggctaaatgtagttttgattgaggtggtagttggtctcctataccccctttttgttttttcaatatgcgttgtaatgtttgatgtgcctgctctataatgccttgtcctctaggattataaggaattcctgttttatgggttatagcccaaagctgtaagaaattttgaaaagcatgactagtataagtgggtccattgtcagtttttaattgtttaggtatccccatgtgagcaaatgatgacagacaatgtggccatacatgaccagctgtctcacctgtttggcatgtagcatgcagcatatgagaataagtgtctatagtcacatgaacgtagctaagcttaccaaaggttgctatgtgtgcaacatccatttgccaaatttcatttggagccaaacttcgtgggttacagccttctacaggtatagttccagggacatgctggcaagtaggacaggcttgtattatagccctagcttggctatgagataaatggaacatgcgagtaagggtggaagtattttggtgcagaagtgcatgagatgcttgagcttgccgaaacacagaaccaatcagtttgtctgctttctcattacctagagataggggtccaggaagttgtgtgtgagagcaaatatgagaaatatgaaaaggagctgcatgagaacgaataacttgttgaagtcttaaaaataaattaagcggctgggcatggtggctcacacctgtaatcccagcactttgggaggccgaggcaggtggatcatgaggtcaggagatcgagaccatcctggctaacatggtgaaaccccttctgtactaaaaatacaaaaaattagccgggcgtggtggcgggcgcctgtagtcccagctactcgggaggttgaggcagaagaattgcgtgaacccgggaggcggagcttgcagtgagctgagattgtgccactgcactatatcctaggcaacagagcaaaactccatctcaaaaataaattaattaattaactaattaagcagttctgggtctagtgtacttttaattgtggcagtttctatgcgactggctacatttacaacataagctgaatcacagacaaagttaataggatctgaggctgtgagctgtaaaacctgaatgactgcaattagctgtaagcgttaagctgaaacaccagaggtatctagcttctcctgtgttaggggcacaactgtgagagcataagtgtctgctattgaggccacccagtttgtggtgctttgtcatgagggccctaggaggcgaatatacttaccaagagcaggggacacttgagctcaataggaaaggctgtggagctttcagaggggaccgtacaggaaaacgcggtgggcagaattaacagcacgaaggcagggcctacaatgtggaaaagcacagacacagttgtgcaggctggaagtcaagttgaggagtccgcagggcgacgctccctctgagaccttgcagaatccttccttgccccttcctggtttctggcggtgaccagcgatcctcaatggtccttggcctgcagctgtgtcacttttatctctgcctcggtcttcacgtggcattttcctcttcttataaggacacctgtcatattggatagggacctgccctgatgacttcatcttaaatttactgcgtttgcaaagactcagtttcaaacaacgtcacattcagagctcccagagttaggacttcaacataacttttgggggaacacacgtcaacccccaactggaagtcttgcttgactgagttcaggtccttctctctgctcgcatggcatctttttatcgaatttgtcattggaagtgtctgtttatatacttgtcaccctgccctctgtcccacctccaagactatgagctttccttttttttctttagaggcagagtcttgctctgtcacccaggctggagtgcagtgatgcaatcatagctcactgcagcctcaaactcccggctcaatcaattctcccgcctaggtctctcaagtggctgggactacaggtgcatgccaccacacccagctaagttcttcattttttgtaaagacagggtctcattatgttgcccaggctggtctctaactcctgggctcaagcagttctcccaccttggcctctcaaagcacagagattataggagtgagccaccgtgcccggcctgctgagttctttaagaacagggaccccacgtaatctttatttccgtgtccccatggcccagcgccctggatcatttgtagtaagcatctgatgaaaggagcttgcactcagaaagccctggctgtggcctggagtcagaaggcccagccaagccctgcctctgtcacttcaaatgtggccttcagcaagccatgtcacttctctggacttcagtttccaatcctataaaatgtgagtaagaactcctgtcatacctgcctcacagagaggtcgaggggctccaagatgatgcgtgtgatgaaagcccttcggagccactgtctgtaaaatggagagagttgtgacattcattcttttccagcccaggactttatctcctgctccatctttcctgactcaggcctcaactgcagcctcggtcatcccgtctggaaggtttgcctcagagcccagccaaggtctgggcaggtctgggcatcccatgattggagttggaggtcacctgcagagaaacaatgtcaccacccagtggctgcgcaacccagtttagttccaacctgaactgccctgctgaaaagacaatgtgacctttgcagcataatcactgccaaaagtagtcattttatagcagaaatacagagatactgggtgaactctacaaagtggaagagacaagaaaggtgaagttttcctccacctctcattgcagctccactgttggaggggccacagggatggggtaatgggaccaatttattcccgtggatagtagttcccctgggtgtctacatccagggctcttcctctggtgtttgtctactctgggtgtttacaccctgccagagcagaggctggcttaagacctgtgggtgggcagatcccagggtccctcactctcacacaggcaggttttagcccatgttggtgaggcgtgagtcacaggctggagaggaattcacttcaagtcagtggtttgggatggcagggatattcatttcctgattctccttgcattgcgcctctcttaataattacacctaataatgacggaacaatgttctcttgttagagaacattcacatttaatttatttggcttccttaacagctttgtgagatatgtaggggatataaaattatatctcaatctatgaaaaagaacaccaagattcagggaaaatgggacaatgccatttttacagtgaggaggaggctttgttatctaagtcaatgccccatttcctgaggggaaatctaagactggaatccaagttgcctgatgtccctggagctctccccaatgataagtcttggtcagtttggaggaagtggctccagctgctcctgacatatcaccagctctaaaaaaatgaaattaaaagggcaaataaggtcttagttttattttaaaaatagtttgatccagtggaccccctgaaagggtcttggtaactcccagtggtccccaaccatacttctagaacaaccgctggcccagagcaggaaggtaaactgtggagggggtgaacagagaagcaaagtctccagtgtcccagtgttggtcacagccagctgtggctggaaggctgggaagggaacaccactcatatgtttgtctcagtcagctcagctgctatgacaaaacaccagactgggtggcataaacaacagacatttctcatggttctggaggctgggaagttcaaggtcaagatgctggccaatttggttcctggttcatagacccatcttttcactggacctttcctggcaaacagaaagagtgatttctctctctgcctcttcatagaaagccactaataaaataaaatcctgagggcccttcctcatgacctcatctaaccctaattacctccccaagacctcatgtccaaataacatctcattgggagttaccgctttaatgcgaattttgaagggacataattcagtccagagacgtgttcgtcctattttgctgctaacgctattgaggtctgggggctctttttcctgaaccatggcttcctctgaacatctcatcctctgcccaccatgggcacctcctggagtgcagggggctggcgggcagagcagaatttgtacctttcccgcctcccctgtggtgcagacctgggtctgggctcacaggaggctcataaataccagtgactggaacagagcagtcaggctgtgtcctcagccaaccctgagcgccctgagcaggcatctcatatgctttctgggagaccagtgaggctgtgctgggctgcagcccggagcgtgggccttgccaagcgccagcccatctctctgcagaaaagctcccatttttgtctggtgctcccccttccctctttcagctgcatctttgagacaaggtggtcagagctggcagaagccaggtgtctgggaatgagatttgaatcagctttttttcccctctgcatgactgtgctaggtgaaagtctcccttttctctcagcaggagactttccatgtggagggggcaaaagggaagttaggagaagcagcaaaatgagaatattggcccagcttgtcttcagaatctgtcaccccatgttccgagcatagttcaaattgccagggtccatccgctgtagcccctccctacctgccccattcccagatgtcctggggctcctgcaggaggaaggattaagctggcctccctggtctgtgactctctcatgccacccagcacctactccagtctggaatgctttgctcttctttccaggtcattcctcctctcacctcaatttcctcctcctgcacatgggcgccccctccagactccatgcagcccctaccaccatctccaatccctcagatctctgcttgctgcagggtgccaggcatttgcaatgaatctcacattgctttttcttgttattgaatatgagatcgtctctctcaaatcagaatataagaagccccttgaagactacatcaagtgttattcattcctagtaccctcccttccttccgaatgttgtccttctttctcctactcccaccccacaaaacacaaacacaaacacacacacacacacacacacacacacacacacactcgtagacagggaggtatgatggcattctagatgcttggtggaaaacaatttggagaatgaaaagacaagccacgaacttggagaaaattttgcaaaacacattatctgataaaagacttctgtccaaaagatacaaagaacttttaaaagtcaacacccaatttttagaaatgaacaaaaatacaaaaaatagccgggtgtggtggtaggcacctgtaatcccagctactcaggaggccaaggcaggagaatcgcttgaacccgggaggcagaggttgcagtgagccaagctcacaccactgcactccagcctgggtgacagagcaagactctgcctcaaaaaaaaagtggggggcaaaagatctgagcagatacctcaccaaagatgtacagatggcaaacacagacatgaaaagatcctccacatcatatgttattagaattgcaaattaaaacaataatgagacaccactgggcatctgttggaatggctaattctaatagatggctaaaatccagaacactgacaacaccaaatgctgacaaagatgtagagtaacagcaactttcattcgctgctagttggaatgcaaaatggtacaggcacttctgaagacaatttggcagtttcttttttttcttcttctttttttttttttttcgagacggagtctcactctgtcgcccaggctggagtgtagtggcgcaatcttggctcactgcaagctctgcctcccaggttcacgccattctcctgcctcagcctcctgagtagctgggactacaggcgcccgccaccacgcccggctaattttttgtatttttagtagagacagggtttcaccatgttagccaggatggcctcgatctcctgaccttgtgatccgcctgactcagcctcccgaagtgctggaattacaggcgtgagccaccacgcccggccagtttggcagtttcttacaaaaccagacgtatttttacaataagatccagcaactggtgtttgtactccttgatatttgcccacaggagttgaaagcttaagtccacacaaaaacttatacatgaatgtttacaatagcttcattcataatagctcaaactcagaaacaaccaagatgtcttttaatagatgaatgggtaaataaactgtggtacatcccaacagtggaatattattcagcaatttgaaaaatgagctctcagccgggcacggtggcttatgcctgtaatccgaggtgaatggatcatttgaggtcaggagttcaagaccagtctggccaacatggtgaaaccccgtttctactaaaaatacaaaaattcgctgggcatggtggtgagcgcctgttatcccagctactcgggaggctgaggcaggagaatcacttgaacccaggaggcagaggttgcagtgagccaagatcgtgccactgctcttgagactctgtctaaaaaaaaaaaaaagaaagaaaaaagaaaagaaaaagaaaaatgagctatcaggccatgagcaggcgtggaatcttaaatgtctatcgctaagtgagaccggttgcagtggctcacgcctgtaatcgaagcacttcagaaggctgaggtgggagcatcactgggcaatatagtgagaccctgtctctaaacataaataaataattatgtacataattaagtgaaagagacccctcttggagagtctacatactgtatgactccaactatgggacactctggagtcggcaaaactatggagacggtgaaaagatccgtggttgccagggattatggggaagggaggggtaaaaaggtggaacacagggaatttttagggcaatgaaaccattctgcatgatgctgcaatgatggatacatttgtgaaaacccattgaatgtacaacacaaagaataagccctaatgtaaactgcggacttcagttaataataatgtgtccatactggctcatcaattgtgataaatgtgccaccgaaatgcaagatgaaaatagtagaggaaactcactgtgtatgaggggcatatgggagctctctacattttctgtttatttttttctgtaaatctaaaactgctcttaaaatttttaaagaatcataactagaaaaaagctgtcaatttgaagctaacaagtcacgtccatgtaaattagtttcaaactgagtggcacttgctgtctgccaggcattgggctctgagcacttcacacgcatacattcatttcagccttacaagaatcctatgaggtccctccctattttacaggtgagaaaactgaggcccagtgaagttaaataacttgctcagttatggttagtaagtggtggagctgcgattcaaacccaggcagtgttgctccagctactatactctaaaccacatattaccccgcattactcttccccaaacttttcattttattttatttctttttttttttttttttttttttgagacagagtctggctctgtcacccaggctggagtgcagtgacgcgatcttggctcactgcaagctccgcctcccgggttcacgcaattctcctgcctcagcctctggagtagctgggtctacaggtgcccgccaacatgcctggctaatgttttgtatttttagtagaaatggggtttcaccgtgttagccaggatggtcttgatctcctgacctcgtgatccgcccatctcggcctcccaaagtgctgggattacaggcgtgagccaccgcacccagcctatttcatttatttatttagagataggatcttgctacgttgcccaggctggagtgcaatggcatcatcatagttcactgcagtcttcacctcctgggatcaagctatcctcccatctcagcctcccaaagtgctgggattacatacaggcatgagccatcaagcctggaccaaacttttcattttgaaagaggatagaaaaggggcacccaagggactaatttttaaaatcaactttattatggagtaatttacctaaaataaagtcacccattttaagtgttcagtttcatgagtttgggacaaacacatatgctaatataaacaccaccacaatcaaggaataggccatttccatcactacagaaagcttcctcatgctccttcccaggccacctcacccacctccagcctcaggccaccagtgatctgctttcagtccctgctgtttagtttagacttttctagagttttctagagttatgactggatcatacagtatgtctcctttttgtggctggcttttttgtgcatgtcagagttgggggcaggcatcctgatatgtttgagattcaaccatactgtttgctatggtttgaatgtgtccgccagagttcatgtgttggaaacttaacccccagtgcatcagagctgggtgttggggtctgataagaggtgactaggtcatgacagctctgtcctcatgaatgaattaatgttatttcaagagtgggctttttgtaaaggggactctggccccctcttgctctcttgcttgctctcccttccaagtgccatgcccttggacttcccagcctccagaaccatgagtcaaatatatttctgttcattttaaattaccaagtctgtggtattctgttatagcaacagaaaatggactaaaacagtgttgcatgtattggtagttcactcaaaggaactaatttctaattgcaagatttcagatatgttaatccccaggagaggaaagcacactttttttattattattatgactaggaccttcccaggctgcttgagttgtactgatcctggtcccacttcaaagcaggggaggcactgagtgacatcaccctgaactggaccccaaatgggctccaagcacaggaagttgttggagggattgagtcactcccaactcaagcgggtgatggaaagggcaagttagtcatgtaacctggtctcatggaatgcttctccctcccagactgaatttccttctttgctgaatacacaggactgccctgcatagccttcttcattagagaaagctatgagaagctttgagctcctccaagtaaactgtttcatactctcaaacaggctgttaatgatgatgattaataataaattaagcaaaagaaggccaggtgcagtggctcatgcttgtaatcccagcactttgggaggccgaggcaggtcaatcacttgaggtcaggagttagagaccagcctgaccaacatggtgaaaccccatgtctactaaaaatacacacacacacacacacacacacacacacacacacacacacacacacaaattagctgagcgtggtgacgcacgcctgtaatcccagctactcaggaagctgaggcaggagaatggcttgaagccaggaggtggaggtttcagtgagccgagattgcatcactgcactccagcctgggcaacaagagtgaaactctgtcttaaaaaatatatgtaataacaataataataataaagtaagcaaaagaaaaggaaagggatgaagttagcacactgtggttgacagaataattttacatcctagaaaatagattaaatgaaattacacttttcaatgtaaaaacgttgtgtttcctgggaaaaaggcagatgcgtcctaaccactcctgattgcatacatatgcaatttacaattgtactttctgagcagatttggaactctcctggggcttagctgacttggtctgggtctggtctcagcacccctgctaaagcctcctagggaaggtgctcgggttgacagctctctgggcctctggttccatgtctgtaaacaagatgcttggagcacaatttctcaagttacctggcggctctttagatcttaaccctttaaatctctagaattttagggtttcaaccccattggtatagcttggccctgaagagagcaagcgcacattgccgtgtgagagacagaccactaaggggcgctgcttcctcggaggaggcgggagttctcctcctcctccgcattctctcctctgatgaaaccacactcatcaaaagtggttgtgacagaatgctcagatttggaatgatgagaaacacggaagccacatcataggacctgatagatatctggccaacacaggaacactggaatatgtgatctatgtgaccatccccttcccaaggccagatcgaacacccaccccttgacatataccaacgttaattgcttaatgacacgaggaaatacattctgaaaaattcgtcattaggcgattttgtcattgtgcaaacatcacagaatgtacttatgcaaccctaggtgatatagcttactacactcctagggtatatgggatagactgttgctcctgcactacagatttgtatagcatatgactgttctgaatactgcaggcatttgtaacacagtggtaagtatttgggtatctaaacatatctaaacatagaaaagatacaatttaaaaaaatgataaggccaggcacggtggctcacgcctgtaatcccagcattttgggaggccgaggtgggcggatcacgaagtcaggagatcgagaccatcctggctaacacggtgaaacctcgtctctactaaaaatactaaaaattagccggacgtggtggcgggcgcctgtagtcccagctactccggaggctgagacaggagaatggggtgaacctgggagatggagcttgcagtgagcgaagatcgcgtcactgcagcctgggcaacagagccagactccgtctcaaaaacaaaaaacaaagaacaaacaaaaaagatagaccggtttagggaaggcatttcccatgaagggagcttgcaggactggaagttgctttggctgagtcagggagtgcgtggtgagtgaatgtacactgtacactgctgtgggctttataaacactgcacacttaggctacactcaatttatacataatacttattttttcaataataaattagcctgagcttactgtaactcttttactttataaactttttagtttttaaaacattttttgactcttgtaataacacttagcttcaaacacaaacactttgtacagctgtaccaaatttttaaatttctttagtattctgtaagctttttttctattttaaaaattatttacttttgtctgtgttgtaaacttttttgttaaagacgaagacacaaacacgcacattagcctaggcccgcacagggtcaggatcatcaatgtcagtcctccacctccacatcttggtccaggaaggtcttcaggggcgttaacagacatggagctgtcatctcctaggataacaatgccttcttctggatacttcctgaagcacctgactgaggatgttttacagttaggcttgtttttttttgttttttttttttttgagatggagtctcactctgtcacccaggctggagtgcagtggcacaatctcgtctcactacaacctccacctcccgggttcaagtgattctcccacctcagcctcccaagtaactgggattacaggcgcccgccaccatgcctgggctaatttttatattttttagtagagacagggtttcaccgtattggccaggctggtctcgaactcctgaccacaggtcatccgcttgccttggcctcccaaagtgatgggataacaggcatgagccactgcacccggacagcttttttttttttttaataagtaaaagtacaccctaaaataacaattaaaagtatagtatagtaaatatataagccagtaccatagtgatttattatcattatcaattattatgtactatacgtagtgacatgtgctagactgtcatatgactggcagcttgtatgttgtttacaccagcatcactacaaacacatgaataatttattgcatgacaatgtcacaacagctatggcgtcaataggagagagaaatttttcagctctattataacattatgagaccaccaagtgatacgggaccaccaacatatacctggaccatcattgactgaaatggcattatgcggcacgtgacaatatttccaaatcaccttcccagatggctggatcaatgtttgtttggttggttgattggttccccatttaattcaacaaatagaccatatggagcctcttctgcagttctataaatttaactactcgtttctgcatttttattcatctaagtaatcattactaatacctactaaaattattcctactttcccacttcatcagacgggccttccctggccacccctactggactagcacctgagcctccttcaccttctgtgctcaccagctttagtcttctctgtagcactctgtcaccaaccgactcccacatttcctcatttctgtgtctttgtgtcttgtcagtctcctactctggcatataagcaccatgaaggcacagaccggctacagcattggctgggcctccctggagcctcaggctatgcctactgggacatgctatgcttctttcaatctaagtcggtccagactggtaggagagtgatttggcaagagagtgcaaaagccaagggaaaaaaaagaaagaatcgcctctagcctttgactcagtaatcacattctgggaatggatcctaatgcagtaattcacatgacccctggggatggggtggacaggaggtgttgccttccctctccctgtgtggggtctgaagccctgagggacaaggagtcactgtgccctcctcaaagatgccctcctcacaacgcaacatttattgtccaagtaccatacgagggactgttctgagtctgagcccattcagtccttttactcctttggagctttttttttttttttaacagataccgctttgtcacccgggctggagtgcagtggcatgatctcagttcaaatgcagccttgacttcctgggctcaagtgatcctcctgcctcagcgccccaagtagctaggactacaagcccataccaccacgcctggctaatttttatattttttgtagagacagggttttgccatgttgcccaggctggtctcaaactcctggactcaagcaacccacccaccttggcctcccacagtgctgagattacaagcttaagccactccactcaacctcttaggagcattttgaggcgcttcttacagatgaagcatgtgaaggaaaagggagttcacatcagttaatggtggagccaagatttgaacccaggccccctgactgcacaagcatgccctgaacctactgtacgactctgcctctgcagcagtgcaggacctgagtggtggaggtggcagggtgggaggtgtatccagacttacagacataaggcatcccgccatcattttgtttcatctgggacaagggtctactgttgtcctgaagtagtctcctaggtcttgatttcaattcaacaaaagggcatcaataaaacactcagtgcaaacttcagatactctactcatttcctcttggaagtgaggacatggtaaggcagagatggacttactgaggcctccagtgtgggccactaatacttgctggacgagtcaagctccttttggttctcccagctcggccattccctgcctctgtgacgctgggaaaatcacttctctgagccagggctttctcatctgtaacaattagcaggaaccacactgtacccaatcaataaatattactttcacaggggtaattgtcatggcgtaatttacactagcaaaaagctgtaaacaactgaatatccaataatggagaaatgactccattgcacaataatttcagaccagaactgtctaaaaccattaaaaattacattgaaaaattaacacaaaatgatatagtaaaaaaaatcagaggccaggtgaagtggctcacgtctgtaatcccagcactttgggaggcagaggtgggtggatcacttgaaaccaggagttcaaggacagcccggccagcatggtgaaaccctgtctctactaaaaatacaaaaattagccacacgtgatggcacatgcctgtaatcccagctactcgggaggctgagacagacttgggaagctgaacctgggagggggaggttgcagtgagccgagactgcgccactgaactccagcttgggagtcagagctagagtctgtctcaaaaaaaaaaaaaaaaaaaaatcaggatacaaaaactgtaactacaatttggttgaacaaatattctgaaggaaagactccaaacagtaggtgtttatgggtgataagacaccagagtgacaatttcttccttacattttacatattttctgaatatttcacaagaagtttgcttttctttataacagacaaaagattatttacaaagttggtctcctttcattttctaccttattagtgaatgctttagcaagagagggtaggactagaagtggaaggatgggagatggggaaaggggagagctcagtttcaccagcatttattgagcatctggtacgtccaggcactgtgtagggtgtgacagctgagtgaaagctcaataaccaggcattactgtgcagagaagccaagggaatgtcacgttcaaaggtcctggggtgtgaaatagaaggcttataggagcacagaaagtaaggcccagggggagaggtgagatgtggttggcagttgggcaggctggaaatgccccagaggccctgtcagcttaatcaagggattcagattacatttttctttttctgagacggagtctcgctctgtccccgaggctggagtgcagtggcgggatctcggctcactgcaagctccgcctcccgggttcaccccattctcctgcctcagcttcccgagtagctgggactacaggcgcccgccaccacgcccggctaattttttgtatttttagtagagacggggtttcaccatgttagccaggatggtctcgatctcctgaccttgtgatccgcctgcctcggcctcccaaagtgctgggattacaggcatgagccaccgcacccagccaggattcagattacattttgaggaccttggagccacggaggatttttttaaatttttaattgaaattttattgggtgtattacgttctatacaattttatcacctgtgtggttttctgtatctcaagacactgaatagttccaccaccacaaagatccctcctcctgcctttgataactacacccccttcctctgacccttgccctctactgcccaccagagtcagggactgatcagtggggagggtaaggaggaggcaacggagaagaccccatatctgcctgggagagctcacaggagtcaaggtggaccgtgagttgcagtgccaagtttggggcttgccaggttagctacggccatgggaatgtccaggtgaaagtctttcggggccaatggatttaaatatccatggcttaggagagaagcctgggctggaggtgagatttgggaggggtttgtctcctcagggagtggagtaagagaggactgaggaaggagccgcctttcaggtgacagtctacttctgcacaggggtcccttgttttgcagctcgctgcctccttgggactggcaaagccctgctcttgcttaaggagccctctctgtgcagagggctctcccagcatgcccatcccccacccggagcctcagagccaggcacaggaggtccttctgcacaatggccacgcattagctgtgtcctgttcagtccccaagcacagggcttgttaatcccagccctaccattccaggaaggaccccagaggtcacggaatccaaagcgttgaatttacaaagaagaaaactagtcctcggagaagaggcttggccaaggccatagacgtgatctgctggccgaaagggggctgtttatttactggttcaggatcggttttccccctacaggaaaagggaggtgaaacccaggcgagatgggtgcaagtttctgaacactttcattcggcagctttaattgagcgtgtattatgtgccaaggagggccagggttttcgggataggaggtggacaaggcacgggccctaaggctggtggataaggacatcgaagggttaaattctgggacggctgcagggaggaaagggtagaggaatctcccgaggaaaggcccccttcccggcatctcaggctccggaaacccgggcgcgaggagcctgggaagggctgccccgcaggccttggcctcccccgcggagctccctctggccctgggagtggccgctctcgaattacaacaaaagaggccggaggccgggcctgctgcggcggccgccttcggggaagggggtgggtccggggaggggtttgccatcctcctctagttaaaagtaagggggaaaagagtaaacgcgcgactccagcgcgcggctacctacgcttggtgcttgctttctccagccatcggagaccagagccgccccctctgctcgagaaaggggctcagcggcggcggaagcggagggggaccaccgtggagagcgcggtcccagcccggccactgcggatccctgaaaccaagtaagagcgcttcccgcgccaccccctccccgaagcggttcgcgagaaagcgggagcgtccctatggggtctccaggcttcgtcctgcgcggggctgcctctcgacagtgcctgggggttcccaaagacttcttgcggggagcgatgcgaggacgtgcaggctaacgggtcctcctgccgccccgggcggccccgcccaaccccacctcgtacgggccgggcgcggcgcggctgctggcgcgcccggggagcgaggcgctgggtccctggatcgtcccgagcgcccgtaatcaggcgggacagagcccgtcaagtctcggtgtgtgctgggcgtcttggagagtgcagcgtggctccagggacagcgtctccggaattctggctttgaggagtggggcacgcgggggacgggtcgggagacagtgactgccctcggggctgtggttttggggatgtagagcgtgctgggctgggacggagtgggggcggggaccccgggggctgcgcccgggagctgtagcgtccactgcttgaacccggttcaacccccagcctgctcgaaaggctgttgggagcgcgggagcgccgtgagtcctgcgggagcagaggcgctctcggcacgccaggtatgcactcccaagtcgccctgcctctccggggaccagggaccctctcccgccttcatcacctagaagccctggagttggaaagaacgggcacgagcgaacccacggctacagctgatcccaatcttgagccgttggtccggtggtctgaagtgcctacaacttttacgcaggcgctttgcccaccgcgccccttctcaccagcccaaatttggaagccctctgggtgtggctgcctgctcgaggtgtcccaggaatcagcgctggaatagagatgattgggagaacaagcgaggttccctcctctccgtgcccgagctaagaccatcaaaaaacagccggagtgcggggcggagcggggcgagggtgtgaggaagagaacaccgcagaacacggcgagggagggggctgaactactcaatatggttaggaaaccccaagtcctgatgaggggagagatgtgcatgacagaaacatgctccaaattagtttcgtccctaagatcttgaaactgcagagatctcaaaaacaatactttttttttttttctcccagaggaagaaaaacgctgaggctcacggtcactgagttagtcaatgtggggactgaaacccatacctcttactccaggcccctcccctacaccactgctagcctgtccgtcctggaaccccaaaacaacatttgtcatctttggtggaatgaattagttattgatggtgtatcatgtacttaatggtcagggttggggtttagggtggaagaggaagagttcatttccctggtcagttcccagataagtgactgactcactggatcctaacttgactaaatttttaatctttctcctcacctttgtcccgttcctcttcctggtccctagtatctgccctggaatggccaccagagccatgacaagatgcgtgctccccatgggccccagtggctaccaaggctctccccaaggaaattgagtctcactaatctgtgtgtgcacgcgcgcacgtttgtgtatgcatgtgtgcacgtgtatgtgtgggcacatgtatgtgtgcatgtgtgtgtctccacacgagtgtgtttgtgtatgtgtgtgcaccggtgtgtgtttatatgcgcacacaggtgtgtgtgcgcgggcacgtgtgtgtgcacgcaatgtgtgtgcatatgtattcctgtgtgcatgtgtgcacacctgtatgtgtatatgtgtatttgtgtttgtgtgcatgtttgcatgtgtatgtgtgtgtgcgcgtttgtgcacttgtgtgtatgtgtgtgcacgcatgtgtgcacgtgtgtatatgtatatgtgtgtttgtgcatgcatgtgcatttgcttccctgtaactttgtgttagaaagtgacttagtctaaggtcacttaggcattgagtggcaaagttgagtatgaaactcaggtctgaaaacaaaacgtacttaacaccacacattggctgacattttaagtatcacagataggagattctgcaaagatgcttccttttattttctttccaactggcctctcctggcctcttcccaagtccttgtcctttgacctctagatggccagtgtggaagggctttgtgaaggaaacagattttctgtgctctagatagacatgaccatcagcgaaggtgttgagtcccagaaaacactacattgtttattttttattctcaaaaaatttcaagtatgcaaaaaaagtagagagaagggtataatgatgcctcataagcttctcactgaatttcaacagttattttgccacatgtacgtcatctgtccctttgtttctgtcattgaagtagtttaaagcaaatcctatacatcatgtcatttcattgctacatatttcagtgtgatttctaaagattttacataactatgatgccatatttagacctaagaaaactaaaaaaaaaatatttggtatcatctaatgccaaatagcagtctatatttaagcatttcccaattttcctcaaaatgtctttttttatagttgatctgagttctgttgatttgtgtaacttgttacattcctattgttatgttcttcctttcaaactacttttctgtccactatgtcatttgattcttacaaggtcccactaaagagttaggtgagtattttcaaattcatttctcagctgaggaaatggataaacagataagctgtccagagggcacagctggtgacccagggagccagggtctaacccagcctcctcatggctgggcttcggtggttctggttctccatgttactcgtggactctcagctgctctctgaagagttcttcttggctcaggcttcatcctgggcttatcacttcctatacacctgctgtcagaaatccctgtgtaaatattagtaattggacatttggtgcttgagataaatgaactgcaaaatcaggaagccagggtttgtttcctagctcattgcaaaactgtaagggctcagagctgccctctctgaactagagagcagtgtacttcctcattatttgactccaaggtgtaaaaataggatgagtgaaatgactgttgctgggattcctggaagaaacaaaggccccagaaagaaatctagtagaggacaatctcccctctctgagcatcacctgagtactctgacagctggtaccttcatgctgaagccctcaaatcctatgacagagaagtaggggtatataggcttcccattgaagcccttagtttatgcatgactttattctgcatttgaccaatgaagatatgcaacacctgatatggcttggctgtgtccccacccaaatctcattgtgaattgtagctgtcataattcccatgtgttgtaggaaagacccgatgaaaggtaattgaatcatgggggtagatctttcccctgagaagtaaatctcgtgagatatggttttataaatgggagtcccctgtacatgctctcttgcctgccaccatgtaagatgttcctttgctcttcctttgtcttctgccatgattgtgaggcctccccagccatgtggcattgtgagtccattaaacctcctccctttacaaagtacccagtctcgggtatgtctttattagcagcatgagaacagactaatacaacaccagagccttctgcttttagcattttcattacttaagtttatttgcttttgaaatggagcgaagaagaaatttctccaccttgttaatgagactcataagttggaattctcctttcttggcagatcatgtgggaaaaaggaatctcttggcacaggactcctagatgttctgctgttacgcttgttgctttgaaacagggaatgaacagaccttccataaaatagccagttagaggcagagaaactggtcaacccgattccatccaacgggaggaactccgaagtggcaagacattaaccttaaatcaccctgccttctgacggccatagattctttttccttagctaataggctgtctccatggaggaagaatttctaggtgattccacaccagcagctgcagttgcacaagcatgactgcttccttcattttaaagtttggggagccttaggaggtgttttagtccattttctgttgcttataacagaatacctgaaactcggtagtttattaaacaaaaggaatttagttcttacagttatggagactgagaagtccaaagtccaggagctgtacctggtgagggccttcttgctggtggggacttggcagtatcccaaggtgatgcaggaccatcgtgagggggctgagcatgataacatgctagctcaagtctcttttcctcttgtaaagccaccaattcccttcccatgataaccgattcatctattaattggtgaatggattcatcagtttatgagggcagagcactcatgattcaaccacttcttaaaggccccacctctcaaaactgccacattggggattaaatttcaacatgaattttttggagggacacctattcaaaccacagcaggagatatgatttcccattcccaggggctgcctggctttaaaagagcagcttgttactgtcatcgtccatttccccctggagaaaggcttttgtggtcggtctgcatggcagtcacaccctgggtggtccatgaggcctcagatgaagtggcccgaggccactctgctctaggcccacagacaaggcgggaatagcagttgcaggctagaaaaggaagggccaaccagacattcacagagatgcaaccagagcaacacacagctgagtctcttaagtcttcagtcctgtgtaagttgaagcaagacatcagaaatctctcacctgagtaattccacacatgcacccactgctgtccaatgcagtgcttgctcagcagggagcacctcttggccaagcgtattggcagcccttctaccgtgaccagcgtcagggacgtctctaggcgccttttcagaatagctggcaacatagggagacccagtctctaccaaaaaaaaaaaattagccaggcatggtatagtcccagctactcaggaggctgaggcaggaagattgcttgagcccaggaggtcaaggctatagtgcattccagcctgggtgacagagtgagaccctgtctcaaaaacaaagaaagaatagccacttggttgatgatgataaaggatgctggggactgtgtagttcagacttctgtccagagttttaacaaatcttttgcactttctgtggcagaaatactattaccaggcaagtagtgtgtgtggcagatgagaacaagaactaactcagcagatgctgaggttgtggttaggaacacagttagtaggttcttcttgtccagggcttttgatcccttcacttgggataccttaagtattatatttaattatagtcttctaagcaaagagtgatgttttctttttagttttttcattcctacgatccacgtcagacaagcagacacagctggccctctggatgtcctgtggcaacagacatatcctccttgatgtgttgccaacaaagtgctgagggtatcttctgcaaaaatgatgccacttgcctataaaacatacacttacgacaagataacttatggtgatgacttgtgaacaacttaatttgcagtttctttataatatctttctggaacttggatccatgaacttcttttgcccccaggcttgtcctgatataccactggggtaccaaggtaaacacagtatagctcttcagagtgcctgcatgactcgaagatgtagtgagaaagatacttttctaaatatctttctaaaacaattacaaatataaaattgagtaaagcacatttctttttttttttttttttttttttttgagacagagtcttactctgtcacccaggctggagtgcagtggtgcaatctcagctcacggcaacctccaccttccaggttcaagagattctcctgcctcagcctcccgagtagctgggattacaggcatgcaccactatgcccacggaaaagcatatttctttcttttttttttttttttttgagacagagtcttgctctgttgcccaggctgggagtgcagtggcgcgatctcggctcactgcaagctccgcctcccaagttcacgccattctcctgcctcagcctcctgagtagctgggaccacaggcgcccgccaccatacccagctaatgttttctatttttagtagatacagggtttcaccgtgttagccaggatggtctcgatctcctgacctcgtgatccacccgcctgggcctcccaaagtgctgggattacaggcgtgagccactgtgcctggccggaaaagcatatttctaaagatgatttcacccaccccaagaatagcatatctaggtaaaatcacatgatcctaagtatatacccacataggctttttgggttgcttttgtgtttattgtggtaaaatatacgtaacataaaactcaccatcttaactattttcaagtgtacagtgcagtggcgttaagtgtgttgacactgctgtgctaccatcaccatcagccatctctggtacttttgcatcttccaaaacagaaactctgtacccattgaacactaactccactctccccctccgaccaatccctggcagcccccattctactttctgtctctgtgactatgactgaactaggtacttcatataagtggaatatattatatttgtcttttcgtgtctggctcattttacttagcatggcttccaggttttttcacgttgtaacctgtgtcagaatttccttccttgttgagcctgaataatatcccactgtatggatagaccacatttgtttatctcctcctccactggtggacatgtgagttgtttccaccttttggtgactgggaataatgctgctgtgaacattggtgtacaaatgcctgttatggatgaacttttacaaagtgaacatgcccttgctactacatcaagaatagaacattagcaagaatgcatgaatttaaaggcaaagcaggagatttcaaatacgtttcatgcccaaacatggctgcttcaattacacctcaagatcttgggactggatattgattttctctaccatgagggggtttggaagagatatttgaaagaacacagttaataatctgtgatttgaaagagtcagtttataatcacagattagttatgagatttaagtagctcctttccttaaaacgtctagggatgggagtacaacctgttgagatttgcaattgtagctgtgttagggtatcaccactaggatcattccaggctgccccttggccattgtagggttcaaatccacctggagaactcctgcctttctggcagcttctgctggagcacaagtctaagcccattctttggccgtatcctgcctgccctcctcatttccttcctccctccttcccttcccacctgatctctctctcgtttttttgtttgtttgtttgtttgtttgtttgtttgtttttgagactgagttttgctcttgttgtccaggctgtaatgcaatggcacgatttggctgaccgcaacctccacctcctgggttcaagcgattctcttgcctcagcctcccgagtagctgggattacaggcatgtgccaccacaccctgctaattttgtatttttagtagagacagggtttctccatgttggtcaggctgctcccgaactcccgacctcaggatcctgccgcagcctcccaaagtgctggaattacaggtgtaagccaccgtgcccagacttctctctcttcttaagtagaacgatttatcagtgactctaagagtttatgtgtgtatttagaaataaggccaggcacagtggctcacacctgtaattctagtactctgggaggccaaggttgggggattgcctgagctcgggagttcgagaccagcctgggcaacagggtaaaaccccatctctactaaaattacaaaaattagccagtcatggtggtgcacgcctgtaatcccagctactcaggaggctgaggcggaggttacggtgagccaggattgtgccactgtgctccagcctgggcgacagagtaagactctgcctccaaaaataataaaataataataataaagtcttcagtcaagagtaatattttgatgcctggcaaccacccccaggctgcctgcatgacactttcaagtgtcatcgaagtagattcttttttaaaagactttattgagatataatttgcatatcatccaattcacccattaaaatgtacaagtcaatggatttcagtatattcacagatatgtgcaaatatcaccccagtcaactttaaaatgttttcatcaacacaaagagaagtccatatccgttagccaccaccgcctatcctcccagccttaaacagccactaatctagtttctgtctctatattgccaattttgtataatttgtgtaaatagaatcatataatatgtggttttttttttttttttttggtctggcttttttcacttcccttaatggtttttttgttgttgtttctttgttttgttttgttttgagacggaatcttgctctgtcaccaggctggagtgcagtggcgccatctcggctcactgcaacctccgtctcccaggttcaagcgattctcctgcctcatcctcccaagtagctggaactacaggcgtgcgccacaatacccagctaatttttgtatttttagtagagacggggtttcaccatgttggccaggatggtctcgatctcttgacctcgtgatccgcccaccttggcctcccaaagtgctgggattacaggcgggagccacggtgctcccctaatgtttttaagcctcaccatgtgtcagtatctcgttactttttatggccgaataatattctattgtatgggcataccgtattttgttaatccatttatagttgacagacatttgggttgtttccaccctttgagtattatgaataatactgctatgaacattcatgtaaaagttttgtttgaacacctgtttcaatgtgtttcaattttgggggggtatatacttaggaggggggttgctgggtcatatagtaattctatgtttagctttttgaggaatcaccaaattgtttttcacagtggctgtagtattttacatttccactagcaacgtatgaggattctaatttctccacatctttggggacactttttattttccccttaagaaaattccagccacctttatgggtatgaagtggtatctcatggtactttgtgtttgcttgatgacgagtgatgtatcacacctttttatgtgcttgtaagccatttgtatatcttctttggggaagtgtctatttaagtttttgcccatttttaattgggttggttgtctttttttttttttttttttctctgagacagagtctcactctgtcacctaggctatagtgcagtggcacgatctcggctcattgcaacctccacctcccgagttcaagcgattctcctgcctcagcctcccgagtagctgggactacaggcacgcgctaccgtatctgactaatttttgtatctttagtagagacaaggtttcaccatgttggccaggctggtcttgaactcctgacctcaggtgatccgcccacctcggcctcccaaagtgctaggattacaggcatgagccaccgtgcctagcctgggtttcttgtctttttattgttaaattataaacaatttttacatattctgaattctagaccattgcagatatatgatttacaaatattttctcccattctgtgggttatcttttccctttcttgacagtgtctgttttctttccagttcaaatcacatttattcaacgtctattctgtgttgagcacaggggatccagaagtgtataagctacagatgcttaccctctagagggatcaccagcttaaaagagaaacagacatgcaaatagacaatgacaaaacagtagaataagtgcgataaatatttggtcatcacccttttttctcaccctcaccactgctgccctggttcataaagcatcttcaaaacatttttttttgatgtgcagaagtttttttattttgataaagtttaatttacgtatattttccttttgtttcttgtgcttttggtgtaatgtctaagaaatcactgccaaatccatgaagacgtactctatgttttattctaagggttttacagttttagcttttacattaaggtctttgatccattttcatttatttttgtaaatgctatgaggtcgggccccaacttcattcttttgcatgtggctattcagttgttccagcactgttttttgaagacaattctttccccattgaatggtcttgggaccttgtccaaaccaattgaccatagatatatgagtttatttctggactctcagttttatctcattgatctatatgtctctccgtatcccagtaccatactgccttgacttttgtagtaagttttgaaaacaggaagtataagtcctcttacttcgttctccttttcagaattgttttggctaatctgggtctcttgcacttccacaggaattttagaatcaatcagcttgtcaatttctgcaaagaagtcagctgggattgtgatagaaattgtgttgaattcgtagatcaatttgaggagtattctcatcttaaccatttaagtcttccagtccatgaacatgggatgttttcccatttatttagatcgtctttaatttcttttaacaatgttttgtagttttcagggtataaagtttatatttcttttgttaaatttactcccaagtattttattatttttgatgctattgtaaatgggattgctttatttcattttgaatttttcattgtgactgtatagaaatacagttaatttttgtatgttgatattgtatcctgtaaccttgctgaactcatttactggttttgatagttttttagcagattccttaggatgttttatacacacacgtgagtcgattcttaaagagtaggtgttcatgaagtggatatgtgatgttctagaacaggaaatggcaagtccaagggcaggggggtgtaaaagcagttggaaccacatgtgcacaggtcagcatggctgaagctcagggtagcaggttgaagctagtttgtgtcatgctaaagaggatggagacatcctgtcactggtagtgggagccatgccagtctggagatggagtaagactattagaatcattctttaaaaagaggcccagaagaggcatgtgatcagcaccaatgaaactgatcagcttcacaagtagctgacaaggtctgtctccctcagtaaaagcgaggacctgcaggtctctctctatatgccactaccctgtggatgacattaccttgatgaatggtccctggtgacccagcaccagctggcattgtagcagccaagcccggccagcttcagtgatgtgacacttgatgcctgctgctattgctccttaggcttctggacaggatccagatcatgggctcttagtgaacttcagaccagcactcctacctgactgccttatggagccagaaatttccagacaagctgaaaatgtggctgtggtctctgtgccagctgcccctgccatcactgggttctctgggtttggctgtcataggacaagcacaggcctaaaggattgattattagcccaggttgcattgcttggatgacagcttggcctggcagcttctggagatgcgaaaggtatacagagccaagggcgaggtctgctgtcatgagcctcacatgaggcatgtgacaagctaagcaggaagggcatagggaggatgtcacttggggactgagctcagaaggtgcctctctggccacttttgatgggtcatctcagaaaaactggttttgtactccctccagcccaggattcccaccatctttcacccagtacactcatcttatttccaaccacccaaacccctcctgacctcagtgtctgtgcctaggccaaatctcagcactccccctccaggaattttcatgccacgggccccatccctataatccctggacttgcttgcagtgatttcatttcctaccaagcttgcatgccattttggatttggcttctgttcaccttccccttgcctgccttttgtggacttcaatatcgccttgaaagtggcacagaaactcagaccgatttggccatagattattagctctgagaaacagtgtgtctgagagagtgtgtgtgtagtgggggaggatgattaaagcctgttacccaagagtgcttgatgggaatgatgatacgcctcctggattttgtccagattgttgctgattttataattgtggtgactgagccagtcactatactgggcactttaacttctgatgtagcccgtgaagaacctaaaactcttccccatttgcagaagccagatttgaatctgagaccactctcagatgctggccatgtttttccaattgttatgtgttatcttatagtcaaaccatgtctcttgttttgttgttgtttgtttgttaaggttgtagggatcgggtaatatgaacccaacaggcattgatatgatttggctgtatccgcacccaaatcttatcttaaattgtagctcccataattcccacatgttgtggaagggacccagtgggagataattgaatcatggggcaacttccctcatactgttcttgtggtagtgaataagtctcacaagagctgatggttttataaggagagacccctttcgcttggctctcatattctctcatgtctgctgccatgtaagacgtgcctttcacctttcacctttcacctttcaccttccaccatgattgtgaggcctccccagcctcatggaactgtcagtccattacacctctttttctttataaattaccccatctcaggtatgtctttatcagtagtgtgaaaacagactaataaggcatccttgtctctatcactttctgaattgcctttaagcaaaatcaccaattttggattttccctgcccctttatgagctgcagagaagagatgtgtcttatagactaatgtatttggcttttgcactctgatccgatctgagagtctctggtaggcacattttaaagtctttgaaactgtaccttcagccttcccaggaaacagcctggtcagaatgagattccacccagagccagcggtgggctgcggggaacccccattggtcacaacaaattatgccaacaaagacctctttttggaggctgggggaaaaaatgcagttttgtatgcttaccttctcaccatctcactgtgccctgaacattcccactttgtggccagaaatagacgagactgaagtagactctttggccaggggccaagtggatcagacagcccggaccaagcctggtgttaaagtctccattcttgtctaaggtggttctaaagggtcccatggcccccgagccacttccctcattctctgagcaaaccccattcagccaagacagcctgtttccacaaaggaatgtgttccccgtggggccagaagcagccccagaccacagctgagatcgccactccacagtgtgctctgggccatgaatgaggaccattcatctctcctgttggtccaagcaggaatcccaggcagggagggtctgatggaggagagagaccccaccctagcccctgaccccaaatgtgaatgcaggcatctggcagaaatgtcaagcggaacattctgtctggaaggaagaaattcagccgagctctgggccacactgttgcaagcaagtgtccttggcagggtagggcactgttcctggctgagaactgccaggttgtttatgagatgcttcaaatccggggcaggcaggactgttgctgggagctccagggcacaagatgtggagccagtgctgggaggaatgaatcacttccctatttactgggggcctgccggaggccaggcaagcaaagtggggtcccattgaagcctgctttgtgagagtcctatgccccacatactcatattagggaaggggacagttatgagcatcacatcaggatcaggttgtgtcagggcacttgaaaatctaaaagcatgatgtccaaacactgtataatttttacaatgtgttttcccctttatctgtgcatgactaggaatttttattgctattggcaataaaaacaattgttgctattgactaggaatcagttagtcacatggggcattattcgactgcgtgccacaaggtcaagtgtcattgatcagaggtcatgttctgggtttctcctgtgtttaagaatgaactaggaagccaattgtccttgattttccagaaggtaccattaagcaggtgaattctataacacagaatgcctttttaggtggatgatgaaatgattcaaaacggattgcttttggaggaagaaaaaaatttcagtagcttcaataaaaatcttgatactggagagttttttggagtaggcctttcacattccttcctaggcagactgactcagctatcaaggtagtagcctaagaaaaggacactaagaaaaggaccctagaaaggccagttttacattttcttcttttcctctgttagctctgctgggtcaaaattaagtgaggcttcatgaaggattttcaaacactcatccattatcaggacaatactactactgggataagaaaaatcagggattctggagtgtagcagaaagttcttagggtgacaggtgcttcaagggctaacaatgtcttccaatgaatgatgcttgttggacaattgtaacagtactgcttatgaccaactcagaaccttgagtaagttcaaggttctgaacctctttctctccctccaacccagccctcttccccagctctcagcaagatcagcaagcactggctgatacaagccctgcttaaaagtctttttttcccctaccctccttaaaagctttacttgcagacttggcacaattttgcacatacctaatgtatacagtatatgagaagacacctttttatttagataattaagctttttgctaatattgtatattctttggagtaaatgtacatttctagtgtgtgtgtgtgtgtgtgtgtgtgtgtgtgtgtgtgtgtgtgtgtgagtatattttttgctttttgtttttgtttttcttggagacaagtcccagctctgtcgcccaggctggactggagtgcagtggcacagtcactgctcactgcagcctcaacctcctgggctcaagtgatcctcttgcctcagcctcccaagtagctggaacaataggcatttgctaccatgcccagccaattaaaaaaaaaaatttttttgtagagacaggatctccctatgttgctcaagctggtctcaaacccctgagctgaagcaatcatcccaccttggcctcccaaagtgccaggattacaggcatgagcacccagcccatttctaaattttaagttgttgcaaggtgcgggatccagaaggaactacctaggctcagccttggcagctcacagttccccaaataacacctggggaagctgaagatcaaaattaaatgtaagcaactgcattatgcagcttagtatcactcagaactgtagttggtgcctgaataacctgactcgaatctagcaggcagcacctgtttgaaccaagatatattagctgctatttttattggccacctgctatggtctaggaacttaagaagcatgatctttgatttttacaacaggcctgaaaagatgtttcatatttttccttaaaaaagtttttttgtttgtttgtttgagacagagtctcgctcttgtcgcccgggctggagtgcaatggcgtgatctcggctcactgaacctctgccttccgggttcaagtgattctcctgcctcagtctcccaagtagctgggattacaggtgcccaccactatgcccagctaatttttgtatttttggtagagatagggtttcaccatgttggccaggctggtctcgaactcctgacctccagtgatccacctgcctcagcctcccaaagtgctgggattacaggcatgagccaccgtgcctggcctaaaaagttgtttttaagtacatattgtttccatttggtagatgaaatcctgagacttagaaaaatctaagtgggcctaggtcacagagctaataagctaagaaataagatttgaaccaaattctgcatgactaagccgctagtccatgccgtttatggtcagtaaagaggtggcagagcatcccgcctgtttttcctggaagggtgtgctgtgggctgtctgagtgggcccctgcattgggaggtgcccgagaccctggggagggtaagctgatcccacctgatgtttataaggaatacctcgatccccgagtccctctaatgtgaaggaattctttcctgatctctctctgataccccccgaggacacagtgcctcttgttggcaaagcttatactagaatcatctgtgtgaatgttgtaaccttgaatggactgcattgaatgtaagagggttctcagccgtgcagtcaaaagcccagtgagaccatattgggggataatttctccctttctgaagagccaggcacaaccaacttttcctggcagtctctggcttttatttgtgtcagtcagagacttcagtccttcggcaccttgccttgtccctttaattacgacccactcctgggctcaactgtgtgaataattaaggccatctgccacggcagctcccagacctcactcaaactaggtttgaacaggatactctccaaggtgggcctctcaccttgacttatgcctgcaatcccagcaccttgggaggccttccccttgcggacccttgcgtgcctgtgaaagccgcatttatttggagcgtgtggagggagctacggagatccttggcctgattctcccatgttctgctgacccagttggcagatgctctctgcttgcattcagcgtagaggagggtcctggaatttccatgatgtggactgaggtgacttcactggagcagatgcttcttagactgtcaatgttgagacacccttggaggtcttccaaggtgaatgctgagaatagatctgcctgttttctaaaaactctccccactgtggtatctccaccaggcttttttatttcttttgtgaaattaagatctctgagcaaggactaatagaacaggtatggagaagagaaatgtgtctgccatattagtctagatgtcctcaaatgtctggaagggtagatggagaacttacatatttgtttattctaagacatcgtaagagacacagagcacttatattttgttctctttctttcttttttggagagggagtcttgctctgtcgcccaggctgtagtgcagtggcatgagctcagctcactgcaacctccacattcagggttcaagcaagtctcctgcctcagcctcctgagcagctgggattacaggtgtgtgctaccacgcccggctaatttttgtattttttagtagagatgggatttcaccatgttagccaggctggtctcgaactcctgacctcaacaattagtgaataagggtgtctgctctggtatctggctggcctggttacaaattccagcttgatcactttttagcagtgtgactataggaaaatcatgtagcctttctgtctctcggtttttccttaggaaaatagggatgctgataataccttgctcagggggttgtccaaagctgtgttgtgcagtatggcagccaccaccatatggggccaccaaacacttgcaatgtgctgcttggaattgagatgcgctgcaaacgcaaagtacgtgctggatttcaaagacttagtacaaaaagaaaaaagaacgcaaaacatctcattaataatttttgtattgattccatattgaaatatattgcatcaaataaaatatatctttaacattga

SEQ ID NO: 15573 - DNA, 34372 bp, Homo sapiens
tggggggagactacaatgctgctaaatttactaaagctgcaaaggtacccttgagagacgccgtctgctctgcatgcttttgagagaccagtgtggacggtgacgggttatgtcctcctttcacattgacagggaaagacggagtatagaaggctgcactgcagcatgttgggatcctgttccctttgcttggagggaggttgaatagtcacagcagaagtaaaaaatgtactgtacgctgacttctgcaccactccattagctaccctggtcatcagttagctccaaattacagtcttttatgtcatttttgtgctttgctgcatgtgacaattctcctactagccttccccctccctgacctgccaggatactcctgttcttgtgttctctctgccttcctgacaccccttaaacttaggtgatgccagacttccacacttggcccctgatcttcaggttcttggatggtctcatccatattcagggtttgctgctgcctctcaagaagaggctccaatcctgacccctgcccggttgcctgctagattccacaactccagacaaacccaccatcctctctccattctgttcctgttcttctctcggttaatggcatcgccaaccatccagtccccttccctgcagcctaggagtcatggacttctccctctaaccatttcatctctccctatacaccccagtgtaatcagtcacaagtgtggtattttatcttccaagtatttctcaaacccatctcgaagcgcagagcactgtatgctgtaatcatgtcagacagctggcttccctcacgctctccgcgacttctctgtgtccatgtccatgttcctgaagtgcctatgccgagcccgttccccaggccaagtgctttttccttgtgctccctgtcacacacccaggcccatctcccacctctcagcagtgtcttcatcctttaaatagaggtcgggatggtagccacctcgaggagttaagtattacattgagaagacacacttacacaatgctcaataaaagttattataacaaataacttcaagaaaagtgggatctctttcccttctgttaaagacaaaaaccttttgcagttattatcccagtagcttgtactgtgtcctccacagatgtaggacttagtttgaagtagctaaaatactgcttcacttttccaaaaatgtatgcccgtaccatgcagtcatggagggagaaactaaacagttttggagaggttggttgtggacagcaaagctctctttaacaataccctggacagaattttaaggcaaggcattgtgtttgcgaatcagtaagtattccctgagtgtttgtgtgtcttgccatttgttgtataagttaagcttgtgtgtttcctaatgggaaggatatgcttgttacaaatataaatttggtaaaccatttttaaagtgagaattttaataagcctttactagtgatctattttggtgaatttgttttcaggattattgtgcaacaaagtggtccattttgcgggaacgctttgaccgaggactgtacgcctctcatgctgacctccacaggcttaagtaagtactagaaggtcaagcccagggcactcttaagaaccataatgcagtgttggccccactggcttgccacaccctggcctcagtccagcttcttctcactcactgttcttcccatctaccctgggcccctttcaaacgggacaaatacttgtgcccagacatattccgtatcttttttgttttggtcacttttactgtctcttacccctgaaattcccctgttcatacctttgcttgttcaagtcctgcccagacatcagagtccagccagaggctgtccctttccagtcttcctctgtcccctcaatcagacttcatccctttctctgagtctcaagaattcatcctacctcgccaatgcatttatcatgttctgctttttctgttgctttttaaaaatcccctttcattgtaagtcacttaagtgcagacactgtatcttactaattattgtatcttattacttgcttagcacagtgcttggcaaaaaataaacctctaataaatatttagagtcatagaatatcagagctgaagagaaccttcctaccatctcattttataataaactgaggtacaaagaggttggaacctgttcagtattcattcaaggagtacatggtgaaatgccagctggaaaagaaacctatctcagggatatatgacattatgccgagaccgggttcatgcactgattgatttgacaggtgaactgctccatgttgtgggaccagggatgtgaagcaagtacatcaaccttgaaacgcgcgcagttggtttgggagagccggcctgaggaagcccctgccccaaggctgcccacagagggaaggattgtgtgtgtgtgtgtgtgtgtgccatcttgacagagtgagtcagtctgacttgcctttgtgcttgccgtttgtaggtatcagtgcttcaaatcggcctggatgtttgaggtgtttcataggggcttttcgtttcctgtcaactataaaagcttaaagactgccttgcaagtttacgacaaggaggttcagtggacccttggagccatcctctacaggacccgctttctaccattaaggtagggctgtgaatttgggaacgagaatcaaaaagatgcttttctgcagttacagcacctcatggcagctgtggtctgtggctgtttggggcattgctgttagagccggccacggcagaattgtagggacagtgacgtttgcttttggtcttgccccctccccacaagtgcttcctcccttctcaccctaccatcccgtaatacacagcactcctgtcctactgccctgtgtttggttattctcaactgtctgttccccagccccggcaaaagggtcagttccggggttcttaacctttatgactcaggcctcttctccaaatactgtttaaatgcatgtataaatacataggattacagaagaaaccatcatattgaaataataccaaaatattacagaaaacaagtttgtgatactgtaatatgtgttcttctctattaacacattaaataacaggatctggcagcagaattagcactttctgtaatttcagtgtagtcaatgagcgtcaatgatattttgaggcattgatgataccataatgggacatgaaagatctgtgattttcgttagtaacaaagttgcaggtgctgccaacgctaatgatagtttgttgtctgcattcatggtcaaagaaatgctacatctcagtcagcgcttgggtagaacaaagatgtgcgtttttccccattcacgtttgcagatctgctgtcagttgacctgtgctaagaacctgagttacctgatagatgagacatttgctcttccccccaccccctccatttaattgagcatttctcagcaacccttttaactgggttaactgtaaaaatggtgagtcatgggtgttactgatcacaagcatgcagtttgtttacatgttgacttctttgtatcagcgaaaccttcacggctcttctaaattcctctgattttggttgcccaaattataatgaccgacttcagagtatactttcacatgttatctcactgatacttagaagccccctgcattgggctgttccgttctccatttcagaggtagggttgcagttcctaaagtgcagctctggggcctgggtcccgccgtccccctgtgcaccctttccacccctttccttgcttactgtcctgtttgttgtttggtgttcacatgggcagagacatccagcaggaggccttccgagccagtcacacccactggcggggcgtttcctttgtctacaaccactacctgttctctggctgcttcctggtggtgctgctggccatcctgctgtacctgctgcggctgcggcgcatccacaggcgcactccccggagcagctcggccgccgccctctggatggaggagggccttcccgcccagaatgccccggggaccttgtgatccagctcacagctccacgaagactcaaaaggaaaagccatttttgcctcagggtttctcctctttattttcctgtggttttgttttttctttcccttttttgttcctccaaacaaaaacaaaatgcaggccgagcgcggtggctcacgcctgtaatcccagcactttgggaggccgaggcgggcggatcatgaggtcaggagatcgagaccatcctggctaacacggtgaaaccccgtctctactaaaaatacaaaaaattagctgggtgtggtggcgggcgcccgtagtcccagctactcaggaggctgaggcaggagaatggcatgaacctgggaggcagagcttgcagtgagccgagatcacaccactgcactccagcctgggcgacagagtgagactccgtctcaaaaaaaaaaaatgcattgtttataagccctgctgtctagaagtattgcgtttagccattttgagtacagcattaaattgaggagtggggaagagggaaattcacttgatttttgctgcacaggatatctgccaaaaataaatgagatttctggggtttctctaaggaatgttaaatttaaacacatgcactttgatactggagggaggtggaaagatgcattctgtcagtggagaggggactgaatagtgatgctttcatagaaccaaaaaacttactgcctgaaatgataatcctcttttttctctatcttgaaagctctaacctgaagagggtgatttttttttttatttattgttcaggtctgttactgtatatgttttctttgcaaatttaaattttttaaaccatttatatccaaaacagagaaacatgggcaccaggagataaccatttataaaagtgatagtgaactatcgactacagctttgtgcgagtgtgtgaaaaatcccaagaaaccagcgtgaggggaggcaatgctggttctttaaaaacacacacttcagaatttactggtacattttatttagaaaaatcctcgttactgttatcttttcctgaccgcaggtaattacgctccttattccatatttcagtggcattagaacactgtggttttgaaagaattggaaattcctagtttcaccagtttcggttttattggaactagagcacatgcccacttcttgctcagtattcctcagtgtttctgcttaatcgtgcctcagtttcttccagcttccaattggtgtttcccccaccccccttaattaaaagtcatctcagcttttaatcgtactgggagaccccatgcacagcctgccgagtcctcttcctaaccgcattgactgaggctgttgctggcagcaccactgtaaatccagaagggaagagtctgcatccaatacaggaaataaattcacattttgaaggaaaaaattcgacaatttaagccaaaatctaaaaaggacaattggattggcatatgtgagattggtgttttttcacctatttatttagttgagaagtttggggaattctcgtacagtttttttaggtggagtttgttttgtgcgagtgtctgtgtgtgctgttccctaactccagaacagttaaattcctgtagttggtagcagattagtacccagaagtggggttgttgctataacagataactgaggatattataaaagtggctttggaactaggtactgggcagaggctgggagagtttggagaaacaggagagaaaaggcctgtattgccatgaactgagcattaggggcagttctgctgagggatcagaagagaagaccaagggaattctgtcccagttgtggctcaaactgcctcaggtgcagcttaacctgcgtctctggaaggtaaaatgcatctgatccttgaggcaagagctgtgggggcatggctccctcacctggatttcaaagcgtgttaccagcagcctggggacccaggctctgcctctggatttacctgcatcgtatttgcgcttcgtggtcaaagttgttaagaaaggggtgagcttctggctacctaataagttggtcttggccacctgcctgcgacacttcctggaggagccatggattattggtggaggctgcagggagctggcgatggagccactggtgtcagcagcagagagggaagaaaggaaaggaaggggccacaaatggttgaagtgggcaggtgggcacccagggagttaggggaccccgccttccagctctgggcatagaagagttagtcacatacctgaggatcctgaaacaagggctgagaaaacctcattgctccagctgagaggtagtagtggatttgccatttttaaacagttgcctaagaaaaaacgttgaagaatatgcagcagacactatatgtggcctgtaaagcctagaatatttactaaaatatttacagaaaaagtttgctggtccttgtgagaacaatgcagttcaaaaaaggatacagacagaagcatcctcttaaatcaggaatgtagtttccatttgtgggcacgaaaagatggacaagagaagtaaccaaacttcaatcttaaaatatttgttgcaccagaatttcacttcggatttttccgtctagattattttcaagatgagttttgaaacaaaccaagaaacctgcccctcacccaaaattgtttaaaaagagaccactcaagggagttcattatgccgtatggagatgtctgcagtcgcagcaaatcacattccagagaaggtctcgcgtaggtgaagacagccaggtgctttctctaagagatacagggtgggtgagagacaagccagggaggatcttaattcaagagaagaattcataccaagagctgaccaagaaggcagtaaattctgtgtacttgtagcagaagaaattggactaggaacttgcccaaagctttatcaaagaaaagcattgtgttcaatcttggtagaaacatgccagcaataagtgcttatgttccatagccatatcatgggcttctcacttttaaacctcctccaggggatgttctcagacatttcacaatccctctggggacattacagtagaagagaaacacatggaactgtaccagtgctttttgcccatgttcatcctaagctccggctttaggcagtgctttctgacctgggcggagtgaagacgctgctggtggctgaggccagtaacatggggcccctgcccagccaccctgaaggctgggtaggtccctcttttcaccaccagttttccacatctgtgtactctagattaacaaactctggataaacagatatttacattttaaactcaggcctacacagagtagttttccttataaggagcatgtatcacttagcaagaaactaaaaatggcaaatgagtttttcatcctttaagaaaaaaatcagctttagaattctctgcggtcagttgtgtgcaatgcaacaaaactacctttcagtaaattacttagttatttatttcagtgttttgtttcttttgatactaagtttccctttcaataatgaatgatgtgaccaaccaaggagaatttgtttgttctgtactaaaattatattttacagttaggaattataaaaagcaagggagcatctttaaatgttttttgtttaagcgatgtcttccatccaaagtaagaataatactctcggaaggtccttttggtgtcatgtcacttgctgtatgtggcagccttacagtgccacacttgggtactgaaaaatcaataaaacgaaagttcatcatcccatggcccgtagactgtgtgggcttgcttccttgtcatctttgaatcttcttactcattagaatgatgagttgaacttgagtccaaattcagtgaaatacattgtctgagtctgacgcacactctttgcatgtgttgtgttgggtgtgcatacagtgaagcacaattgtgtggggttgtggagagggcgtccacactctctgcagctcagaaagcagatatttcacaagtagtgaccaacccacgacgttaagccattcaccaacaataattgccactctgagatgactgtttataaggtcaccattttaagtacctacttgtatatagacaaggaaaagtaataaaattaaccaatttttatgtatttaatagtaacagcaaatgctgactttatgttacactgttttgcagttcgatctaagcttagaacctttggcttacttccagaaaattatgactgtcattattaatgttacgtgttaccaatatggaggatgacattagacgctcagcatgtttctcagccgttggagaatacatagatgttctcctggagcaggaaggtgggcctgagccataacctgaaaatagatgatagagacagatgggaagggaaggggaccagctgttaggaccaacaaaaataaaggcctgagacatgccggagaggagagggaagcgcaaaaacaaaatgagagaacagagccagcaaagtgagctcaagggaggtcctcaagccattgatcgctaggaaaacaggacacagcattaagatagaactgtcgtaaataatttttgaggcagtgcaatgactatagggctttttgcctgactttaaatacgttaaaatatctaagatgttaaaagacatctaaatttttattccacttggtggaagagaagtcagtgcctatttccaacactaaccatgttgacaggtctgaaaagccatggttctgtgtttttgttttcagtctgtttccatttgtcctatgaattggcatgtgccctgtgggtttttttggtttttttgagatccggaaatgctaatggtttgcacagagggggtcgtgaggtgcaggtcacctctgtcagagtcacagtgtcttcttttggaaacgtcatgaaaagacaaaggagtgcccggctaatcccaaagcacgccttggcagagtggatctgcctggagcatccatccgtggcagcatgaaaggcaatcctgtgagagtcttcctggccccacctcgtctgggagcatgtgggcctgtgatcccacctcctcctaacaaaagaagagtgtgtctgttgatgtgttttattttgcttttagccaggctagtccccctgcccttgcgcagtccagcctctttctattaatagatctattaaggttgactgagacctgctgcaggggacgctaggggcactttggccttcgatctttgcctttcacccttgacactgtttggcaggtgaacgacatccgggctccagacttcatggccacttcaacatttctgtcaacagcctgtgtctgtttcatgtaagaggcccaaacaagaaaatcaaggcttaagaaggatttctgccttgagtaaaggactgaaacctcctcacagaacacgatggtgacaggcacaaaagacagacttcttgtttaagtaggtgaactccaaagacgagagaaaaggagtttttttcctcccgttcaaccagtcatcaaataaacatctcaggcatctggtgttttgtcaagggattgggattccagtggcccctgtgtgactggaaggggaaaggtttgtcggtggcaacgccatcgaaacacaaaggagcagctttagaatccccagtgtgggtcttctcttgtgttatttctacaacatccttgtgccagctgttcttgctgttctctcaggcttctaattgggagtgtgaatactacctttcaccctttttgccttcatgagaatcagagtttgaagtggacagttctgaaaatattaatcatctttttttttttttttttttttttttgagacggagtctcactctgtcgcccaggctggagtgcagtggcgcgatctcggctcactgcaagctccgcctcccgggttcacgccattctcctgcctcagcctccctagtagctgggactacaggcgcctgccaccacacccagctaattttttgtatttttaatagagacggggtttcaccgtgttagccaggatggtctcgatctcctgacctcgtgatccacctgcctcggcctcccaaagtgctaggattacaggcgtgagtcaccgcaccgggcctaatcaccttattcttgcctgtcattacacaagccttaaactccagggaccagacttagcactttcttttcctaagattgctttttctcccacttggcccaagctttaatacccagattttagactcaaaacacttaaaacatttggtgggctctcctcagccttgtaaagttctttgatactggtcatggcagcacaagagaattttctggaagttcctggctgtttaatgttcaaattacacgtttaaattctctcccacctcccgtggccctgttttccatcagtgtatctatttctggcccaaatgtccttgaacatggaccatgacaggtcctgtgtttactttccatgtttctacatttataatccagtaaagaagacaccgagtagtacatagtattttgtaaatatttgtaaactaatgaaaatctggtttctttcacaaatcacctctttaggtttctaaaatttatgaaagaaatcttttaaaatctattctaggccgggtgcagtggcttacgcctgtaatcccagcactttgagaggccaaggcaggcggatcacgaggtcaggagtttgagaccagcctggccaacatagtgaaaccctgtctctactaaaaatacaaaaattagctgggcaaggtggcgggcgcctgtagtcccagctactcaggaggctgaggcaggagaatcacttgaacccaggaggcggagtttgcagtgagccaagattgtgctactgcactccagtctaggcgacagagcaagactctgtctaaaatatatatatattttattctcaatttttgctgttctttccagatgtgcagagttgtgtgtggttttaaaaccatatgcaatgtgccgtgaagggcgggatggaacccaggcctctgagtctcagttctctgttcacttccctccaccagagtttgttaagggagtgttgcattttaaagctttatttagaaaaacttaggaaaaccaagtttacctcaagtggtttccttttttcgcaacctgttcagccttgacagaaaggaaaaagaaatcccagaattaggtagtaataatagaggcaaagtgagattgatattttctgaagccctgcttacagaaaataattcctgcatatttattttattctaaacatagcttcagattgtttttcattctaagttgtccttaaaagtcactttttaaacctcacaagaagcaccaaatgtaagggggaaaggatggatttgactacatctaaagtaagactttctgttcatcaaagctaacagatggcagactaagaaggtatttgcagtgactgaaattgaaaagggattaaaatgtacaaagtttcatgcaaaacaacaagaaaaaggaaatccaaaagaaaaaaccggccatggatattaataggtgattcacagcaggggaaacccaaatggtgaacaagagataaactaagctgaagaaatgcaaatgtaaattaagacccactaccttatgcccctcagaattgccagacttcaagtgctggcagtgatgcggggcctggacttcaatattgctggtggtggtgcaaactgcaatgcgtaccccagaagggaagctggcagcttaaaagttagcagcgtgtgtgccctttgattcagagagccacttgcgcgtggctctccggagagatttctacctgggtccatgaatggacttacggaaggattccttggtaatgattctgagtgactgtgttgatggaggcaagcaaggtcttggacaagtcaaaggcggcaggtgcgtaccatggaatactgtatagccatgagagacagacctagaactatgaacagcaagcgggtggctcttaaaaatagtgttgaatactgaaagcaagacatgagaattgttgtataatgccattatgttaatgtagggcatacggcactgtatgtcctatgaggatgtgcatattttgattcaaatacattaaaatggacgttatggggacacagattatttatgaaaggaggagaaaagataaaactgatttccttgttttagggtgacctcacatcccagtgagcccctcaattcagggccagggaggttgattggttaccccaccccaacccaacccaggctgttttcagcacggcagcctgataagctgtgattcagaccttgaagttgttaggcaaaagctctccactcggctctgtatttgactcaggaagaactgaagtctttataatggcctagacagccctgcaccgtggcctcccactccacacctctctgaccgcagtcctcatttctccgagactccgctccagccaccctggcctcagggccctctcaggactttccatccccctcaccctgcttcactttcccccatgatgcttatgaccttagatctagtacactctgttttcattacgttctatgtacgactctccctattaccctactagaacatgagccagggggcagggggcttttgtctgtgtgttttcatgttgtatccccaggcacaggatctgataggcggtagacattcaataaatatctgtggaatgaatgaacaaggcaggatccttaaagcgagggggaatgaccaggctgagaactgagagagcatgctaaactccacagtctggccccagggatgggggcaggaaagatggcaccacctccttgctttattagagggaaagaaggtgcttcttgtgcagaaccgtcatcataacagaaagatagcttattacacgccaggcactgttctagctctttgttagcttacataatccctgtattagttcgttttcacactgctataaagaacttcccaagacggggtaattgataaaggaaagaggtttaattgactcacagatcagcatggctggggaggcgtcaggaaacttacaatcacggcggaaggtgaagagggggaaccaagacaccttggcaggtggcaggagagagaattaatgcagaaggaactaccaaacacttataaaaccatcagatctcctgagaacactatcacgagaacagcacaggggaaaccactctcatgattcaattacccccacctggtctcccccttgacatgtggggattgtggggattataattcaagatgagatttgggtggggacacaaagcctaaccatgtcagtccccaaaatgacaccatgaggaggtgctttgattaccgtcactttacaggtggagaaacagatgtggaaaaggcacacaacttgcccaaggtaccgaactagccagtggtggggctgggatttgaacgcaggcagcctggctccattctgtactctagagctgcactgtccagtatgacggccactagccacatgaaacaggccaatctaaactgagatgagctgtaagtataaaatatacaccagatttcaggccgggcacagtggctcatgcctgtaatcccagcactttgggaggccaaggcgggcggatcacgaggtcaggagattgagaccatcctggcaaatatggtgaaaccccgtctgtactaaaaatacaaaaattagccaggcatggtggtgggcgcctgtagtcccagctactcgggaggctgaggcaggagaatcgcttgaacccgggaggcagaggttgcagtaagctgagatctccccactgcactgcagcctggcaacagagtgagactctgtctcaaaaaaatatatatctatatctgtctgtctatatatagatatagacacaccagatttcaaagacttcatgtaaaaaaaatatgaaatatctcagtttctttacattgggtacatgagacatgacaatattttaggtatattgagttaaataaaatattattggattaacatcacctgtttccttctacctttttaatgtgtacactagacaactctaaattgcctgtgtggctcacagtatatttccgtcagacggagctgctctcggtacttgcttctcaaagtgtggtccttgaatcagcagcatcaacatcactgaagcctgacggaagtgctggatctcaggcttggtctcagacctcttgaatcaaattcttcattttgccagccttccaggtcactcataatgcatgctcacatttgaaaaatgccgcttcagaccaggcagcaatttttttctctaaagggccagataataaacattttaactttgcaggccacatgacttctgtccaaaactcacctcactgcttctgtagtatgaaatgagccagaatatgcacgtgaatacggattccactgtaacctgcacggacctagggggactgaacaaagcggggcaaacacgggaataaaagacaagagacaaaagagtatattttgaagaaggggtcagggggtaccttgcccctagtggacaagggccctgagctttatacagccctccttatttattaggcaaaagagatagtgagaagcggggtggaagaaggggtcagctgctcagtctagagcaggcttgcaagactgcattcctcgaacaacaggctaaatgttgcagtagataacctcagcgccagggagtgattgcctccagcaaaccttctgtcggcaggagcagtcgtcagttttctcacatcctgcattcatgataaacagtttgctgttggatcatatagcctccagtggaatgctgcgttggtcacatcccatgggccttcggctccctgcatatccccctttctgtttatgaattaattgaaaaaatgtaaggccaggctgggcagctctcattctccgattggcagtccatccgattttacagactataaacagaagacagagacgaaacaacattattccaagaactacatataagatgttaatgtggtgccttagataggtccaagggttgaggctctccaggccttgctggaatttggtcccgtcttctaaagaaggctgaaattcttgagtttgcctatttaaatcaagaattttgttttgtaattcaccaatatcaaaggtgatgttggatgtgaacgctccctgcaaatgggctttcacaaggtcccacggatactcactttggttgtattctaagttggttacacaaatatgagtgtgattaaaatgacagcgcaattactgctgcaactgcaagctttgtacttgtgcccctaaccacagaaccgtggatttcagcattgccacttcagtttgtagctcagtgttaattttattctgaagtcgccacgcttggtcagctgtgcgcgtccagttctccacgtactgagctatttgaatagaattatgcaaagctacagaagatatcacaacagaagttactagcatgaccaagtaaacagtagcaaaaattatcatgcctaaggctctacgggcacgatgagtcagctgagttagaagtttcacaaaatgcaaagcaggtgtggcagcccaaggctcagacagattaacaggaatccctagcccagggataccacctaaaatcatcacagtagagatattatgtgtttgcaatgtgctatgattagtgcagtgatataactggcaagatttacaggtcaattgggtattgtttacctggagctggtccttcttagctgccaaaaagacataaggattaaaaacacaaactgtaaattgagtgatgatattctttacaaatgtaaccttagaactgtgttgtgactccggtcggccttctctccgtctttgcattcaggctcagctgactcatggctcataccgggaccgggtccatggttggccaccctgggttcctccagtctcccattccatggtcgcacgcaccttgagggcacccacacagttcatccatctcctgcaaaaacacaagtataccctcttccccacattagtaaatccactggacctttccattggccttcttccggggatttccgtaacactttcggataaactttcctcttttcctctaacacttgccaatgtctttctgctggagtctttaccttccataccaggagtcagaaaatttaaagtaaggctaaatgtagttttgattgaggtggtagttggtctcctataccccctttttgttttttcaatatgcgttgtaatgtttgatgtgcctgctctataatgccttgtcctctaggattataaggaattcctgttttatgggttatagcccaaagctgtaagaaattttgaaaagcatgactagtataagtgggtccattgtcagtttttaattgtttaggtatccccatgtgagcaaatgatgacagacaatgtggccatacatgaccagctgtctcacctgtttggcatgtagcatgcagcatatgagaataagtgtctatagtcacatgaacgtagctaagcttaccaaaggttgctatgtgtgcaacatccatttgccaaatttcatttggagccaaacttcgtgggttacagccttctacaggtatagttccagggacatgctggcaagtaggacaggcttgtattatagccctagcttggctatgagataaatggaacatgcgagtaagggtggaagtattttggtgcagaagtgcatgagatgcttgagcttgccgaaacacagaaccaatcagtttgtctgctttctcattacctagagataggggtccaggaagttgtgtgtgagagcaaatatgagaaatatgaaaaggagctgcatgagaacgaataacttgttgaagtcttaaaaataaattaagcggctgggcatggtggctcacacctgtaatcccagcactttgggaggccgaggcaggtggatcatgaggtcaggagatcgagaccatcctggctaacatggtgaaaccccttctgtactaaaaatacaaaaaattagccgggcgtggtggcgggcgcctgtagtcccagctactcgggaggttgaggcagaagaattgcgtgaacccgggaggcggagcttgcagtgagctgagattgtgccactgcactatatcctaggcaacagagcaaaactccatctcaaaaataaattaattaattaactaattaagcagttctgggtctagtgtacttttaattgtggcagtttctatgcgactggctacatttacaacataagctgaatcacagacaaagttaataggatctgaggctgtgagctgtaaaacctgaatgactgcaattagctgtaagcgttaagctgaaacaccagaggtatctagcttctcctgtgttaggggcacaactgtgagagcataagtgtctgctattgaggccacccagtttgtggtgctttgtcatgagggccctaggaggcgaatatacttaccaagagcaggggacacttgagctcaataggaaaggctgtggagctttcagaggggaccgtacaggaaaacgcggtgggcagaattaacagcacgaaggcagggcctacaatgtggaaaagcacagacacagttgtgcaggctggaagtcaagttgaggagtccgcagggcgacgctccctctgagaccttgcagaatccttccttgccccttcctggtttctggcggtgaccagcgatcctcaatggtccttggcctgcagctgtgtcacttttatctctgcctcggtcttcacgtggcattttcctcttcttataaggacacctgtcatattggatagggacctgccctgatgacttcatcttaaatttactgcgtttgcaaagactcagtttcaaacaacgtcacattcagagctcccagagttaggacttcaacataacttttgggggaacacacgtcaacccccaactggaagtcttgcttgactgagttcaggtccttctctctgctcgcatggcatctttttatcgaatttgtcattggaagtgtctgtttatatacttgtcaccctgccctctgtcccacctccaagactatgagctttccttttttttctttagaggcagagtcttgctctgtcacccaggctggagtgcagtgatgcaatcatagctcactgcagcctcaaactcccggctcaatcaattctcccgcctaggtctctcaagtggctgggactacaggtgcatgccaccacacccagctaagttcttcattttttgtaaagacagggtctcattatgttgcccaggctggtctctaactcctgggctcaagcagttctcccaccttggcctctcaaagcacagagattataggagtgagccaccgtgcccggcctgctgagttctttaagaacagggaccccacgtaatctttatttccgtgtccccatggcccagcgccctggatcatttgtagtaagcatctgatgaaaggagcttgcactcagaaagccctggctgtggcctggagtcagaaggcccagccaagccctgcctctgtcacttcaaatgtggccttcagcaagccatgtcacttctctggacttcagtttccaatcctataaaatgtgagtaagaactcctgtcatacctgcctcacagagaggtcgaggggctccaagatgatgcgtgtgatgaaagcccttcggagccactgtctgtaaaatggagagagttgtgacattcattcttttccagcccaggactttatctcctgctccatctttcctgactcaggcctcaactgcagcctcggtcatcccgtctggaaggtttgcctcagagcccagccaaggtctgggcaggtctgggcatcccatgattggagttggaggtcacctgcagagaaacaatgtcaccacccagtggctgcgcaacccagtttagttccaacctgaactgccctgctgaaaagacaatgtgacctttgcagcataatcactgccaaaagtagtcattttatagcagaaatacagagatactgggtgaactctacaaagtggaagagacaagaaaggtgaagttttcctccacctctcattgcagctccactgttggaggggccacagggatggggtaatgggaccaatttattcccgtggatagtagttcccctgggtgtctacatccagggctcttcctctggtgtttgtctactctgggtgtttacaccctgccagagcagaggctggcttaagacctgtgggtgggcagatcccagggtccctcactctcacacaggcaggttttagcccatgttggtgaggcgtgagtcacaggctggagaggaattcacttcaagtcagtggtttgggatggcagggatattcatttcctgattctccttgcattgcgcctctcttaataattacacctaataatgacggaacaatgttctcttgttagagaacattcacatttaatttatttggcttccttaacagctttgtgagatatgtaggggatataaaattatatctcaatctatgaaaaagaacaccaagattcagggaaaatgggacaatgccatttttacagtgaggaggaggctttgttatctaagtcaatgccccatttcctgaggggaaatctaagactggaatccaagttgcctgatgtccctggagctctccccaatgataagtcttggtcagtttggaggaagtggctccagctgctcctgacatatcaccagctctaaaaaaatgaaattaaaagggcaaataaggtcttagttttattttaaaaatagtttgatccagtggaccccctgaaagggtcttggtaactcccagtggtccccaaccatacttctagaacaaccgctggcccagagcaggaaggtaaactgtggagggggtgaacagagaagcaaagtctccagtgtcccagtgttggtcacagccagctgtggctggaaggctgggaagggaacaccactcatatgtttgtctcagtcagctcagctgctatgacaaaacaccagactgggtggcataaacaacagacatttctcatggttctggaggctgggaagttcaaggtcaagatgctggccaatttggttcctggttcatagacccatcttttcactggacctttcctggcaaacagaaagagtgatttctctctctgcctcttcatagaaagccactaataaaataaaatcctgagggcccttcctcatgacctcatctaaccctaattacctccccaagacctcatgtccaaataacatctcattgggagttaccgctttaatgcgaattttgaagggacataattcagtccagagacgtgttcgtcctattttgctgctaacgctattgaggtctgggggctctttttcctgaaccatggcttcctctgaacatctcatcctctgcccaccatgggcacctcctggagtgcagggggctggcgggcagagcagaatttgtacctttcccgcctcccctgtggtgcagacctgggtctgggctcacaggaggctcataaataccagtgactggaacagagcagtcaggctgtgtcctcagccaaccctgagcgccctgagcaggcatctcatatgctttctgggagaccagtgaggctgtgctgggctgcagcccggagcgtgggccttgccaagcgccagcccatctctctgcagaaaagctcccatttttgtctggtgctcccccttccctctttcagctgcatctttgagacaaggtggtcagagctggcagaagccaggtgtctgggaatgagatttgaatcagctttttttcccctctgcatgactgtgctaggtgaaagtctcccttttctctcagcaggagactttccatgtggagggggcaaaagggaagttaggagaagcagcaaaatgagaatattggcccagcttgtcttcagaatctgtcaccccatgttccgagcatagttcaaattgccagggtccatccgctgtagcccctccctacctgccccattcccagatgtcctggggctcctgcaggaggaaggattaagctggcctccctggtctgtgactctctcatgccacccagcacctactccagtctggaatgctttgctcttctttccaggtcattcctcctctcacctcaatttcctcctcctgcacatgggcgccccctccagactccatgcagcccctaccaccatctccaatccctcagatctctgcttgctgcagggtgccaggcatttgcaatgaatctcacattgctttttcttgttattgaatatgagatcgtctctctcaaatcagaatataagaagccccttgaagactacatcaagtgttattcattcctagtaccctcccttccttccgaatgttgtccttctttctcctactcccaccccacaaaacacaaacacaaacacacacacacacacacacacacacacacacacactcgtagacagggaggtatgatggcattctagatgcttggtggaaaacaatttggagaatgaaaagacaagccacgaacttggagaaaattttgcaaaacacattatctgataaaagacttctgtccaaaagatacaaagaacttttaaaagtcaacacccaatttttagaaatgaacaaaaatacaaaaaatagccgggtgtggtggtaggcacctgtaatcccagctactcaggaggccaaggcaggagaatcgcttgaacccgggaggcagaggttgcagtgagccaagctcacaccactgcactccagcctgggtgacagagcaagactctgcctcaaaaaaaaagtggggggcaaaagatctgagcagatacctcaccaaagatgtacagatggcaaacacagacatgaaaagatcctccacatcatatgttattagaattgcaaattaaaacaataatgagacaccactgggcatctgttggaatggctaattctaatagatggctaaaatccagaacactgacaacaccaaatgctgacaaagatgtagagtaacagcaactttcattcgctgctagttggaatgcaaaatggtacaggcacttctgaagacaatttggcagtttcttttttttcttcttctttttttttttttttcgagacggagtctcactctgtcgcccaggctggagtgtagtggcgcaatcttggctcactgcaagctctgcctcccaggttcacgccattctcctgcctcagcctcctgagtagctgggactacaggcgcccgccaccacgcccggctaattttttgtatttttagtagagacagggtttcaccatgttagccaggatggcctcgatctcctgaccttgtgatccgcctgactcagcctcccgaagtgctggaattacaggcgtgagccaccacgcccggccagtttggcagtttcttacaaaaccagacgtatttttacaataagatccagcaactggtgtttgtactccttgatatttgcccacaggagttgaaagcttaagtccacacaaaaacttatacatgaatgtttacaatagcttcattcataatagctcaaactcagaaacaaccaagatgtcttttaatagatgaatgggtaaataaactgtggtacatcccaacagtggaatattattcagcaatttgaaaaatgagctctcagccgggcacggtggcttatgcctgtaatccgaggtgaatggatcatttgaggtcaggagttcaagaccagtctggccaacatggtgaaaccccgtttctactaaaaatacaaaaattcgctgggcatggtggtgagcgcctgttatcccagctactcgggaggctgaggcaggagaatcacttgaacccaggaggcagaggttgcagtgagccaagatcgtgccactgctcttgagactctgtctaaaaaaaaaaaaaagaaagaaaaaagaaaagaaaaagaaaaatgagctatcaggccatgagcaggcgtggaatcttaaatgtctatcgctaagtgagaccggttgcagtggctcacgcctgtaatcgaagcacttcagaaggctgaggtgggagcatcactgggcaatatagtgagaccctgtctctaaacataaataaataattatgtacataattaagtgaaagagacccctcttggagagtctacatactgtatgactccaactatgggacactctggagtcggcaaaactatggagacggtgaaaagatccgtggttgccagggattatggggaagggaggggtaaaaaggtggaacacagggaatttttagggcaatgaaaccattctgcatgatgctgcaatgatggatacatttgtgaaaacccattgaatgtacaacacaaagaataagccctaatgtaaactgcggacttcagttaataataatgtgtccatactggctcatcaattgtgataaatgtgccaccgaaatgcaagatgaaaatagtagaggaaactcactgtgtatgaggggcatatgggagctctctacattttctgtttatttttttctgtaaatctaaaactgctcttaaaatttttaaagaatcataactagaaaaaagctgtcaatttgaagctaacaagtcacgtccatgtaaattagtttcaaactgagtggcacttgctgtctgccaggcattgggctctgagcacttcacacgcatacattcatttcagccttacaagaatcctatgaggtccctccctattttacaggtgagaaaactgaggcccagtgaagttaaataacttgctcagttatggttagtaagtggtggagctgcgattcaaacccaggcagtgttgctccagctactatactctaaaccacatattaccccgcattactcttccccaaacttttcattttattttatttctttttttttttttttttttttttgagacagagtctggctctgtcacccaggctggagtgcagtgacgcgatcttggctcactgcaagctccgcctcccgggttcacgcaattctcctgcctcagcctctggagtagctgggtctacaggtgcccgccaacatgcctggctaatgttttgtatttttagtagaaatggggtttcaccgtgttagccaggatggtcttgatctcctgacctcgtgatccgcccatctcggcctcccaaagtgctgggattacaggcgtgagccaccgcacccagcctatttcatttatttatttagagataggatcttgctacgttgcccaggctggagtgcaatggcatcatcatagttcactgcagtcttcacctcctgggatcaagctatcctcccatctcagcctcccaaagtgctgggattacatacaggcatgagccatcaagcctggaccaaacttttcattttgaaagaggatagaaaaggggcacccaagggactaatttttaaaatcaactttattatggagtaatttacctaaaataaagtcacccattttaagtgttcagtttcatgagtttgggacaaacacatatgctaatataaacaccaccacaatcaaggaataggccatttccatcactacagaaagcttcctcatgctccttcccaggccacctcacccacctccagcctcaggccaccagtgatctgctttcagtccctgctgtttagtttagacttttctagagttttctagagttatgactggatcatacagtatgtctcctttttgtggctggcttttttgtgcatgtcagagttgggggcaggcatcctgatatgtttgagattcaaccatactgtttgctatggtttgaatgtgtccgccagagttcatgtgttggaaacttaacccccagtgcatcagagctgggtgttggggtctgataagaggtgactaggtcatgacagctctgtcctcatgaatgaattaatgttatttcaagagtgggctttttgtaaaggggactctggccccctcttgctctcttgcttgctctcccttccaagtgccatgcccttggacttcccagcctccagaaccatgagtcaaatatatttctgttcattttaaattaccaagtctgtggtattctgttatagcaacagaaaatggactaaaacagtgttgcatgtattggtagttcactcaaaggaactaatttctaattgcaagatttcagatatgttaatccccaggagaggaaagcacactttttttattattattatgactaggaccttcccaggctgcttgagttgtactgatcctggtcccacttcaaagcaggggaggcactgagtgacatcaccctgaactggaccccaaatgggctccaagcacaggaagttgttggagggattgagtcactcccaactcaagcgggtgatggaaagggcaagttagtcatgtaacctggtctcatggaatgcttctccctcccagactgaatttccttctttgctgaatacacaggactgccctgcatagccttcttcattagagaaagctatgagaagctttgagctcctccaagtaaactgtttcatactctcaaacaggctgttaatgatgatgattaataataaattaagcaaaagaaggccaggtgcagtggctcatgcttgtaatcccagcactttgggaggccgaggcaggtcaatcacttgaggtcaggagttagagaccagcctgaccaacatggtgaaaccccatgtctactaaaaatacacacacacacacacacacacacacacacacacacacacacacacacaaattagctgagcgtggtgacgcacgcctgtaatcccagctactcaggaagctgaggcaggagaatggcttgaagccaggaggtggaggtttcagtgagccgagattgcatcactgcactccagcctgggcaacaagagtgaaactctgtcttaaaaaatatatgtaataacaataataataataaagtaagcaaaagaaaaggaaagggatgaagttagcacactgtggttgacagaataattttacatcctagaaaatagattaaatgaaattacacttttcaatgtaaaaacgttgtgtttcctgggaaaaaggcagatgcgtcctaaccactcctgattgcatacatatgcaatttacaattgtactttctgagcagatttggaactctcctggggcttagctgacttggtctgggtctggtctcagcacccctgctaaagcctcctagggaaggtgctcgggttgacagctctctgggcctctggttccatgtctgtaaacaagatgcttggagcacaatttctcaagttacctggcggctctttagatcttaaccctttaaatctctagaattttagggtttcaaccccattggtatagcttggccctgaagagagcaagcgcacattgccgtgtgagagacagaccactaaggggcgctgcttcctcggaggaggcgggagttctcctcctcctccgcattctctcctctgatgaaaccacactcatcaaaagtggttgtgacagaatgctcagatttggaatgatgagaaacacggaagccacatcataggacctgatagatatctggccaacacaggaacactggaatatgtgatctatgtgaccatccccttcccaaggccagatcgaacacccaccccttgacatataccaacgttaattgcttaatgacacgaggaaatacattctgaaaaattcgtcattaggcgattttgtcattgtgcaaacatcacagaatgtacttatgcaaccctaggtgatatagcttactacactcctagggtatatgggatagactgttgctcctgcactacagatttgtatagcatatgactgttctgaatactgcaggcatttgtaacacagtggtaagtatttgggtatctaaacatatctaaacatagaaaagatacaatttaaaaaaatgataaggccaggcacggtggctcacgcctgtaatcccagcattttgggaggccgaggtgggcggatcacgaagtcaggagatcgagaccatcctggctaacacggtgaaacctcgtctctactaaaaatactaaaaattagccggacgtggtggcgggcgcctgtagtcccagctactccggaggctgagacaggagaatggggtgaacctgggagatggagcttgcagtgagcgaagatcgcgtcactgcagcctgggcaacagagccagactccgtctcaaaaacaaaaaacaaagaacaaacaaaaaagatagaccggtttagggaaggcatttcccatgaagggagcttgcaggactggaagttgctttggctgagtcagggagtgcgtggtgagtgaatgtacactgtacactgctgtgggctttataaacactgcacacttaggctacactcaatttatacataatacttattttttcaataataaattagcctgagcttactgtaactcttttactttataaactttttagtttttaaaacattttttgactcttgtaataacacttagcttcaaacacaaacactttgtacagctgtaccaaatttttaaatttctttagtattctgtaagctttttttctattttaaaaattatttacttttgtctgtgttgtaaacttttttgttaaagacgaagacacaaacacgcacattagcctaggcccgcacagggtcaggatcatcaatgtcagtcctccacctccacatcttggtccaggaaggtcttcaggggcgttaacagacatggagctgtcatctcctaggataacaatgccttcttctggatacttcctgaagcacctgactgaggatgttttacagttaggcttgtttttttttgttttttttttttttgagatggagtctcactctgtcacccaggctggagtgcagtggcacaatctcgtctcactacaacctccacctcccgggttcaagtgattctcccacctcagcctcccaagtaactgggattacaggcgcccgccaccatgcctgggctaatttttatattttttagtagagacagggtttcaccgtattggccaggctggtctcgaactcctgaccacaggtcatccgcttgccttggcctcccaaagtgatgggataacaggcatgagccactgcacccggacagcttttttttttttttaataagtaaaagtacaccctaaaataacaattaaaagtatagtatagtaaatatataagccagtaccatagtgatttattatcattatcaattattatgtactatacgtagtgacatgtgctagactgtcatatgactggcagcttgtatgttgtttacaccagcatcactacaaacacatgaataatttattgcatgacaatgtcacaacagctatggcgtcaataggagagagaaatttttcagctctattataacattatgagaccaccaagtgatacgggaccaccaacatatacctggaccatcattgactgaaatggcattatgcggcacgtgacaatatttccaaatcaccttcccagatggctggatcaatgtttgtttggttggttgattggttccccatttaattcaacaaatagaccatatggagcctcttctgcagttctataaatttaactactcgtttctgcatttttattcatctaagtaatcattactaatacctactaaaattattcctactttcccacttcatcagacgggccttccctggccacccctactggactagcacctgagcctccttcaccttctgtgctcaccagctttagtcttctctgtagcactctgtcaccaaccgactcccacatttcctcatttctgtgtctttgtgtcttgtcagtctcctactctggcatataagcaccatgaaggcacagaccggctacagcattggctgggcctccctggagcctcaggctatgcctactgggacatgctatgcttctttcaatctaagtcggtccagactggtaggagagtgatttggcaagagagtgcaaaagccaagggaaaaaaaagaaagaatcgcctctagcctttgactcagtaatcacattctgggaatggatcctaatgcagtaattcacatgacccctggggatggggtggacaggaggtgttgccttccctctccctgtgtggggtctgaagccctgagggacaaggagtcactgtgccctcctcaaagatgccctcctcacaacgcaacatttattgtccaagtaccatacgagggactgttctgagtctgagcccattcagtccttttactcctttggagctttttttttttttttaacagataccgctttgtcacccgggctggagtgcagtggcatgatctcagttcaaatgcagccttgacttcctgggctcaagtgatcctcctgcctcagcgccccaagtagctaggactacaagcccataccaccacgcctggctaatttttatattttttgtagagacagggttttgccatgttgcccaggctggtctcaaactcctggactcaagcaacccacccaccttggcctcccacagtgctgagattacaagcttaagccactccactcaacctcttaggagcattttgaggcgcttcttacagatgaagcatgtgaaggaaaagggagttcacatcagttaatggtggagccaagatttgaacccaggccccctgactgcacaagcatgccctgaacctactgtacgactctgcctctgcagcagtgcaggacctgagtggtggaggtggcagggtgggaggtgtatccagacttacagacataaggcatcccgccatcattttgtttcatctgggacaagggtctactgttgtcctgaagtagtctcctaggtcttgatttcaattcaacaaaagggcatcaataaaacactcagtgcaaacttcagatactctactcatttcctcttggaagtgaggacatggtaaggcagagatggacttactgaggcctccagtgtgggccactaatacttgctggacgagtcaagctccttttggttctcccagctcggccattccctgcctctgtgacgctgggaaaatcacttctctgagccagggctttctcatctgtaacaattagcaggaaccacactgtacccaatcaataaatattactttcacaggggtaattgtcatggcgtaatttacactagcaaaaagctgtaaacaactgaatatccaataatggagaaatgactccattgcacaataatttcagaccagaactgtctaaaaccattaaaaattacattgaaaaattaacacaaaatgatatagtaaaaaaaatcagaggccaggtgaagtggctcacgtctgtaatcccagcactttgggaggcagaggtgggtggatcacttgaaaccaggagttcaaggacagcccggccagcatggtgaaaccctgtctctactaaaaatacaaaaattagccacacgtgatggcacatgcctgtaatcccagctactcgggaggctgagacagacttgggaagctgaacctgggagggggaggttgcagtgagccgagactgcgccactgaactccagcttgggagtcagagctagagtctgtctcaaaaaaaaaaaaaaaaaaaaatcaggatacaaaaactgtaactacaatttggttgaacaaatattctgaaggaaagactccaaacagtaggtgtttatgggtgataagacaccagagtgacaatttcttccttacattttacatattttctgaatatttcacaagaagtttgcttttctttataacagacaaaagattatttacaaagttggtctcctttcattttctaccttattagtgaatgctttagcaagagagggtaggactagaagtggaaggatgggagatggggaaaggggagagctcagtttcaccagcatttattgagcatctggtacgtccaggcactgtgtagggtgtgacagctgagtgaaagctcaataaccaggcattactgtgcagagaagccaagggaatgtcacgttcaaaggtcctggggtgtgaaatagaaggcttataggagcacagaaagtaaggcccagggggagaggtgagatgtggttggcagttgggcaggctggaaatgccccagaggccctgtcagcttaatcaagggattcagattacatttttctttttctgagacggagtctcgctctgtccccgaggctggagtgcagtggcgggatctcggctcactgcaagctccgcctcccgggttcaccccattctcctgcctcagcttcccgagtagctgggactacaggcgcccgccaccacgcccggctaattttttgtatttttagtagagacggggtttcaccatgttagccaggatggtctcgatctcctgaccttgtgatccgcctgcctcggcctcccaaagtgctgggattacaggcatgagccaccgcacccagccaggattcagattacattttgaggaccttggagccacggaggatttttttaaatttttaattgaaattttattgggtgtattacgttctatacaattttatcacctgtgtggttttctgtatctcaagacactgaatagttccaccaccacaaagatccctcctcctgcctttgataactacacccccttcctctgacccttgccctctactgcccaccagagtcagggactgatcagtggggagggtaaggaggaggcaacggagaagaccccatatctgcctgggagagctcacaggagtcaaggtggaccgtgagttgcagtgccaagtttggggcttgccaggttagctacggccatgggaatgtccaggtgaaagtctttcggggccaatggatttaaatatccatggcttaggagagaagcctgggctggaggtgagatttgggaggggtttgtctcctcagggagtggagtaagagaggactgaggaaggagccgcctttcaggtgacagtctacttctgcacaggggtcccttgttttgcagctcgctgcctccttgggactggcaaagccctgctcttgcttaaggagccctctctgtgcagagggctctcccagcatgcccatcccccacccggagcctcagagccaggcacaggaggtccttctgcacaatggccacgcattagctgtgtcctgttcagtccccaagcacagggcttgttaatcccagccctaccattccaggaaggaccccagaggtcacggaatccaaagcgttgaatttacaaagaagaaaactagtcctcggagaagaggcttggccaaggccatagacgtgatctgctggccgaaagggggctgtttatttactggttcaggatcggttttccccctacaggaaaagggaggtgaaacccaggcgagatgggtgcaagtttctgaacactttcattcggcagctttaattgagcgtgtattatgtgccaaggagggccagggttttcgggataggaggtggacaaggcacgggccctaaggctggtggataaggacatcgaagggttaaattctgggacggctgcagggaggaaagggtagaggaatctcccgaggaaaggcccccttcccggcatctcaggctccggaaacccgggcgcgaggagcctgggaagggctgccccgcaggccttggcctcccccgcggagctccctctggccctgggagtggccgctctcgaattacaacaaaagaggccggaggccgggcctgctgcggcggccgccttcggggaagggggtgggtccggggaggggtttgccatcctcctctagttaaaagtaagggggaaaagagtaaacgcgcgactccagcgcgcggctacctacgcttggtgcttgctttctccagccatcggagaccagagccgccccctctgctcgagaaaggggctcagcggcggcggaagcggagggggaccaccgtggagagcgcggtcccagcccggccactgcggatccctgaaaccaagtaagagcgcttcccgcgccaccccctccccgaagcggttcgcgagaaagcgggagcgtccctatggggtctccaggcttcgtcctgcgcggggctgcctctcgacagtgcctgggggttcccaaagacttcttgcggggagcgatgcgaggacgtgcaggctaacgggtcctcctgccgccccgggcggccccgcccaaccccacctcgtacgggccgggcgcggcgcggctgctggcgcgcccggggagcgaggcgctgggtccctggatcgtcccgagcgcccgtaatcaggcgggacagagcccgtcaagtctcggtgtgtgctgggcgtcttggagagtgcagcgtggctccagggacagcgtctccggaattctggctttgaggagtggggcacgcgggggacgggtcgggagacagtgactgccctcggggctgtggttttggggatgtagagcgtgctgggctgggacggagtgggggcggggaccccgggggctgcgcccgggagctgtagcgtccactgcttgaacccggttcaacccccagcctgctcgaaaggctgttgggagcgcgggagcgccgtgagtcctgcgggagcagaggcgctctcggcacgccaggtatgcactcccaagtcgccctgcctctccggggaccagggaccctctcccgccttcatcacctagaagccctggagttggaaagaacgggcacgagcgaacccacggctacagctgatcccaatcttgagccgttggtccggtggtctgaagtgcctacaacttttacgcaggcgctttgcccaccgcgccccttctcaccagcccaaatttggaagccctctgggtgtggctgcctgctcgaggtgtcccaggaatcagcgctggaatagagatgattgggagaacaagcgaggttccctcctctccgtgcccgagctaagaccatcaaaaaacagccggagtgcggggcggagcggggcgagggtgtgaggaagagaacaccgcagaacacggcgagggagggggctgaactactcaatatggttaggaaaccccaagtcctgatgaggggagagatgtgcatgacagaaacatgctccaaattagtttcgtccctaagatcttgaaactgcagagatctcaaaaacaatactttttttttttttctcccagaggaagaaaaacgctgaggctcacggtcactgagttagtcaatgtggggactgaaacccatacctcttactccaggcccctcccctacaccactgctagcctgtccgtcctggaaccccaaaacaacatttgtcatctttggtggaatgaattagttattgatggtg

SEQ ID NO: 15574 - DNA, 79099 bp, Homo sapiens
gagccgccgccggggctgtaggcgccaaggccatgtccgactcgtgggtcccgaactccgcctcgggccaggacccagggggccgccggagggcctgggccgagctgctgggtaggtgggcgcggcaggccgcgggagtgggcggcgtccggcccgggacggtttcgccggttccccgatcccttcccgccagagcctccgccggtcggatccccggacgccgcgcccggggggctgtgcggggtgggcgcccggctggggcggcgcggctgcctcggacccggcccctcctgcgcctgggcggacgcccccagccgccgcccgcggggcgctcccttctttcccgaacgccgcccccgccggccgccctgtcaggcgggcctggggtgcgcggcctggggctcccctcagcgcagaggccgcccctcgccagccgtccccgggctcccctgcctcgggccctcctgggccgtcttccccggcgtccgcggtggggccgtctccgttagtttcccgagacctgcgccctggggaggagccccggcccctcttcgggagggtgtcgctggtgggtttctccgcggcgtccacctgcgcgtcgggccggggaccccgtgtgtgaattgtgctgtgatggtttcgaaccgacttctctccgtagcgggaagggtcaagagggaaaaatataatcctgaaagggcacagaaattaaaggaatcagctgtgcgcctcctgcgaagccatcaggacctgaatgcccttttgcttgaggtaagaggaagctggtgtccgtctgcgggcagatttaggttcggggtttttgagtccagccaccgcacagctttcctaagaaaacacccgaggcggcgggcgcggtggcctggcccgcagaggggagggtcgcctgagcccgggagttctggaccaacctgggcaacggggtgagaccccgcctcttttattaaaaacaaaacaacaacaacaaaaaaacaggccgggcgccgtggctcagggctgtaatcccagcttttggggaggccaaggcgggtggatcactcagggtcaggagttcgagaccagcctggccaacatagtgaaacccggtctctactgaaaatacaaaaattagctgggtgtggtggcgcacgcctttaatcccagctactcgggagcctgaggcaggagaattgcttgaacctggacccgggaggcagaaattgcagtgagccgagatcacgccccttgcaatccagtctggattacagagtgagactgtctcacaaaaaaaaaaaaaaaaaaaaaaaaaaaaaaagccgggcgtggtggctcacgcctgtaatcctagccctttgggaggccgaagtgggtagatcacttgaggttaggagttcgagaccagcctgaccaacatggtgaaaccccgtcactacttaaaatacaaaaattagccgggtatggtagcaggtgtctgtaatcccagctgctcaggaggctgaggcaggagaatcgcttgaacctgggaggtggaggtcgccgtgagtgagatcccgccattgcactccagcctggacgacagtgagactccctctcaaaaaagaaaaaaaggaaaatagcccagtagggaagcattacttacacacaggttgtgtttatgcacagatcttgaattttttttatttttattttttattttcatttattttttttgagacaaagtctcacactgtagcctgggctggtatgcagtggggtgatctcggctcactgcagcctccacctcccgggtttaagtgattctcccgtctcagcctcccgagtggctgggactacaggcacgcgccaccatgccctcctaatttttgtatttttagtagagacagggtttcactatgttggccaggctggtctcgaactcttgacctcgtgatctgcccatctcggcctcccaaagtactgggattacaggcgtgagccactacgcctggcctggagcttgaattttttaaatggagtttgttgtgttttggattctaggtagaaggtccactgtgtaaaaaattgtctctcagcaaagtgattgactgtgacagttctgaggcctatgctaatcattctagttcatttataggtaagttatagcttcattttctctattttgaattgcagaagggtttttatatagtaaccatagtttgctaaattaagtagaaatgtaaattttctcaggcgatgggtttccactggtgtgtgtagtcgcaaattctatgggatgtttgtgtgacttgctcttgggcttcttacgatgctgtgtttaaaaacagcgtctgattcaacctgcgactcagaagcagtaggacccagagtgtcccttggaaaaacatgggacatagcaacagcagggatgtgccccttgctcatggaagtagtgagacaggctgtggtgtgcccaggagagcagacgggagaacaattttctaggtacctccttctccccccagtttgagagtgggagatagggtaagttctgggtcaacaacagtaagttattttctgatccttcacgtccttatgtgatgacttgtttctgttaaaataaccttcagtaatagcgctcccttgacaactggtcactgaatgtcattggcaaatgatacagattttcactgccatgattgtatttgaatttcacaaattgcatattatcattccaaggaaccaagctcagccacacagataaacctttaattcattaatttttgagtttgtttttttctgctaaagatatagttagtacatgcacgcacgtgcacacggacacacacacacacacacacacacacagtaaaagacttgtagataaaaaaactttcctatggagacacattggaaacaaatgactagaaattggcattgttggcctggcacagtggctcacgcctataatcgcagcactttgggaggctgaggtgtgcggatcacctgaggtcaggattcgagacgagcctggccaacatggtgaaaccctgtctctactaaaaaacacaaaaattagccgggtgtggtggtgggtgcctgtagtcccagctattcaggaggctgaggcaggagaattgcttgaacgtgggaggcagaggttgcattgagccgagacccctccattgcactccagcctgggcaataagagcaaaactctgtctcagaacagaaaatggcattgtctacttttttttttttttttaacagacagggtctcactctgttgcctggactggagagccgtggtgcaatcacggctcactgcagtcttgacctcctggcctcaagtgatcctcccaccccagcatcttgagtagctgggactacaggtgtgcgccaccatgcctggctaattttttcatagagacagggttttgccatattgcccaggctggtctcaaactcctgagctcaagcaatcagtttacctcagccacccaaggtgttgggattgcaggcatgagccactgtgccccatctgtctacttttctaccgagaatttcaccagcagctgatgatttctcgtactataattttaagcttctagaactattgtaaaattttttttttttttttttgagacgaagtgttgctctgtcgcccaggctggagtgcaatggcgccatctcggctcactacaaactctgcctcctgggttcaagcaattctcctgcctcagcctcccgaatagctgggattataggtgcccgccgccgcacccagctaatttttgtatttttagtagaggcggggtttcaccatcttggccaggctggtctcaaactcctgacctcgtgatcgacccgcctcggcctcctgcagtgttgggattacaggcatgagccaccgcaaccagcctgtaaatgtttttacttatgtattgataatgtgtttttagagccagtacattacaataacaggttcgtactgcagttaacagttttttttttttttttttttttttgagacggagtattgctcttgttacccaggctggagtgcaatggtgtgatctcgactcaccgcaacctctgcctccctagttaaagtgattctcctgcctcagcctcctgagtagctggtattacaggcatgcaccaccacgcctggctaattttgtatttttagtagagatagggtttcaccatgttggtcaggctggtctcaaactcccgacctcaggtgatccacccgcctcggcctcccaaagtgctgggattacaggagggacccactgagcctggcctccagtttttttttgttttgtttttttgagatgaagtctggctctgtcgcccagactgcagtgtagtggcgtgatctcggctcactgcaaactccgcctcctgggttcacgccattcttcgcctcagcctcctgagtagctgggactacaggctcccgtcaccaaacctggctaattttgtttttgtgtctttagtagagacagggtttcaccgtgttagccaggatggtctcgatctcctgaccttgtaatccgcccgcctcggcctcccaaagtgctgggattacaggcgtgagccaccgtgcccggcccggtttctttaaacaattaattttggctcacgtggtggctcacacctgtaatcccagcagtatgggaggccgaggcgggcggattaatgaggttgggaattggagacgagcctagccaacatagtgaaaccccatctctactaaaaatacaaaaaattaactgggcgtagtgacgcgtgcctgtaatcccagctacttgggaggctgaggcaggagaatcgcttgaacctgagaggcggaggttgcagtgagctgagatggcgccgttgcacttcagtccaggcggcagtgtaagacaccattgcaaaaaaataaaacaaaaaaaaattaattttggaagacaaataaattagaaaatgatttcttggcattgcctgcttccaggttgcccaccgtttctcactttattgaatgcagaccagtggctggttgctcaggagaatggtggctgcctgcaggctgttagtgaggttccacttggtggcctgcggactgagcacagctgtgactgcacctgcccaccaggtgcatggcagaatgttgggaaatccctgcctaattttatcacaaccatcaatgtgagtcaacaggggcaggcttatctctgaagtaattagaaaaacaatgtaattgaaagagcctgctgcagttctcaatttattgtgctcctttgtaaaaagatgataaagttcttggtcagaatatatttctttatcttgctccttttgtgtcatgggaaacgtaacaaataccaatgtataactctgggttcaggtgttgccaccagttttattgtgagctgcttggatcatcaaattctcatttttatctcatgtttttccctttgcatctattctccccgtttaaaaggcaattttttttgtgctgcatcttaaaataaggcattttaaacagcaagtctttggttttagattttgtctcatgtgttaagagaaagctatggttttgttttgtgtttaaggctctgctttgcaggatcaagcctcaaggctgggggttcccgtgggtattctctcagccgggatggttgcctctagcgtgggacagatctgcacggctccagcggagaccagtcaccctgtgctgctgactgtggagcagagagtaagacaccagcaaagatgaggaaacctgcccgttgttacttttaagctggttgggaaaataggacatagctttagtattgtttcaggtaatttgttttttaaaaaatgtaatctctcttttcagaagaagctgtcttccctgttagagtttgctcagtatttattggcacacagtatgttctcccgtctttccttctgtcaagaattatggaaaatacaggtaaatttgagattgcaaatctgactctccagtgttccaggcaatgttctgttgatctggatggaggcaacagagtacctgggttttcttgggaattctccaagcttctcattaattacagagagtggatgaaaaagggtttagaaatcatctgtggattggaaagaagtaccttcaattgccattttttgtccctattcacctatcattagtaatatttattagactagaatatattgaaaaacacgtttagccttgggtatattagtatggagaattttccagggtagtatagtaaactattaaaaaaaaatgtatgtaatttttttttccagagacagggtctcgccttgttgcccaggctggtcttttttttttttttttgagacgaagtctcgctctgtcgcacaggctggagtgcagtggcgtgatcttggctcactgcaagccccacctcccaggttcacgccattctcctgcctcagcctcccgagtagctgggactacaggtgactgccaccacgcccagctaattttttgtattttttagcagagacggggtttcaccgtgttagccaggatggtctcgatctcctgacctcgtgatctgcccacctcggcctcccaaagtgctgggattacaagtgtgagccaccgcgcctggcatttatttttatttttgagacagaatattgctctgccgcccaggctggagtgcagtggcgcaatcttggctcactgcaacgtctgcctcccaggttcaagcgattgtcctgcctcagccaccttagtagctgggattacaggcgcgtgccaccatgcccagttaatttttgtatctttttttttttttgagatggagttttgctcttgttgcccaggctggagtgcaatggtgctatcttggcttatcgcaacgtccgcctcccgggttcacgccattctcccgcctcagcctcccgagtagctgggattacaggcatgcgccaccatgcctggctaattttttttgtatttttagtagagacggggtttctccatgttggtcaggctggtctcaaactcctgacctcagatgatctgcccacctcggcctcccaaagtgccgggattacaggtgtgagtcaccgcgccctgcccaatttttgtatctttagtagagatgaggtttcaccatgttggccaggctggtcttcaattcctgacctcaggtgatctgcccatcttggcctcccaagtgctgggattacaggtgtgagccactgcgtccggcctttcccattcttttatccagcatacattatagaattcattagatttttcagttattgctttggtccctgccctcattatcacgtagcttgggaaacaagccactaaatccacaagaagtgcgatgattcatgtgctcacagatttgcgaagaagatgttggacatgcatatcagattggagagttaggaaagccttcctgcacggactgtgaagagtgcgagttaggggccgggcccagtggctcacacctgtaatcccagcactttgggaggccgaggcaggtggatcatgaggtcaggagatcgagcccatcctggctaacacggtgaaaccccgtctctactaaaaaatagaaaaaattagccgggtgtggtggcaggcacctgtagtcccagctactcaggaggctgaggcaggagaatggcgtgaacccgggaggcagagcttacagtgacccgagatggcgccactgcactccagcctgggtgacagagcgcgactctgtctcaaaaaaaaaaaaatagagtgtgagttagggggatgagaaggggaggctgcagggagatcagggcagtgtgacaggcacagtgttcacagtgagtggctaaagcagatcctgttttatcaaatgggagagggttgagtgagaaagacaagggacatgcacagggcacactgaagcctgacctttgtcctggcagcttcgaggagccagtgaaggcttctgaaggagagactgtcatgtcagtgtgtgtaatactgtgttggctgtagtgtggagaaagggttagaagtaggctacagtgcgtaggaagagagaaggaagagaagcaagtgttgggcaacggtgtgtgggtgcccaaaggccagggagtttgaaaaccagtacagctttgtaaaaaaagatgtgtttcaggctctaagtttttgcttgaggttaattttcaatacggcatggttaagaacctaagttgaacattttgtaggaaaatgcattcataaaggactcagaatgctgggggtttttttgtttttgtttttgtttgttttgttttgtttttcagagttctttgttgcttgaagcggtgtggcatcttcacgtacaaggcattgtgagcctgcaagagctgctggaaaggtagcgtgctaatgatgattcagtgttactgtttttgcagtctagtctagtataaattatatttcaaagcccagaatcagacgggtttgatttctggctttgacatataatttgtactagactagattgcattgcatatttatactagactagacctggaggaactattgctttattatttcaagagaacgtttatggtgttttggttttgtttgctttttgtctgttttttttttgagacggagtctcgctctgtggcccaggtgggagtgcagtggcacgatttcagctcactacaacctccacctccagggttcaagcaattctcctgcctcagcctcccaagtcgctgggattacaggcgcccgccaccacacgcagctaatttttgttatgtatttattttttttagggacagagtctcgttctgtcacccaggctggagtgcagtgacgtgatgtcggctcactgcaggctccacctcccgggttcacgccattctcctgcctcagcttcccgagtagctgggactacaggcgtccgccaccacgcctggctaatttttgtatttttagtagagactgggtttcaccatgttagccaggatgggctccatctcctgacttcaggatctgcccgcctctgcctcccaaagcgctgggattacaggcatgaaccactgtgcctggcaatttttgttatttttagtagagatgtggtttcgccatgttagccaggctggtgtcaaactcctaacctcaggtgattcccctgcctcggcctcccaaagtgctgggattacaggcatgagccacctcgcgcggcctttttttttctttttgagacagagacctgctatgtcgccaggctggagtgcagtggtgagatctgggctcgctgcaacctccgcttcccggattcaagcaattctgcccctgcctcctcagtagctgggactacaggcgcgtgccaccacacccggctaatttttgtatgtttagtagagatggggtttcaccatgttggctaggctggtctcgaactcctgatcttgtgatcctcccgcctcggcctagagcagaatttcatctcaaaaaaaaaaaaaaaaagaaaaacctgcttcctaggatatacacatcttatctcagcaccaaaatctatgaagcaaaaatggccagaattaaagggagaagtagacatttcagcaataatcattagaggtttcaatactcccctttcagtaatgggtagaacaagttagattaagaatgatatagaacagccgccccgtccgggagggaggtgggggagtcagccccccgcccggccagccgccctgtccaggaggtgaggggcgcctctgcccggccgcccatactgggaagtgaggagcccctctacccggccaccaccccgtctgggaggtgtacccaacagctcattgagaacgggccatgatgacaatggcggttttatggaatacaaaggggggaagggtggggaaaagattgcgaaatcagatggttgctgtgtctgtgtagaaagaagtagacacgggagacttttcattttgttctgtactaagagaaattcttctgccttgggatcctgttgatctgtgaccttgcccccaaccctgtgctctctgaaacatgtgctgtgtccactcagggttaaatggattaagggcggtgcaagatatgctttgttaaacagatgcttgaaggcagcatgctcgttaagagtcatcaccactccctaatctcaagtacccagggacacaaacactgcagaaggcctcagggtcctctgcctaggaaaaccagagacctttgttcacttgtttatctgctgaccttccctccaccattgtcctatgaccctgccaaatccccctctgcgagaaacacccaagaatgatcaattaaaaaaaaaaaaaaaaaaaagaatgatatagaagttgaatgctgcaaaccagctgacctgactgactgtggagcactctacccagtagtagcagagtgtgtattcgtaagtccaaatggaacagtccccaggatacagcataaggttcaggccaaggccaggtgcggtggctcacacctgtaatcccagcactttgggaggctgaggcgggcagatcacctgaggtcaggagttcaagaccagcctgtccaacgtggtgaaaccctgtctctactaaaattacaaaaattagctgggcaaggtggcaggtgcctgtaatcccagccgttgtggaggctgaggcaggagaatcgcttgaacttgggaggcggaggttgtagtgagctgagattgtgccattgcactccagcctggatgacaagagcaaaactgtttcaagagaaaaaaaaaaggttcaggccataaaacaaagaggaataaatttagaagggctgaaatcattcaaaatatgttctctaaccacaaatgaatttaattagaataaacaacagaagggaattgggaaaatccacaatatttgaaagttaacataatgagtcaaagaagtcacaagggaaattagaaaataacttgagactgggcacagtgccacaccagtcatcccagcactttgggagggcaaggtgggagattgttttgagcccgggagtttgagtccagcctgggcaaagtagtaagacctccagctgggcgtggtggtatgcgcctgttgtcccaactactcaggaggctgaggtggaaggattgcttgagcctgggaggtcgagggtgcagtgactgattgcgccactgcactccagcctcagtgacagcaaaaaactgtctcaaaaaaaaaattgggacatatggctcaactcaatcccctgatgatgggatttagttgagccttacgtctgcctctgtgtgtgtctccagccatcccgacatgcatgctgtgggatcgtggctcttcaggaatctgtgctgcctttgtgaacagatggaagcatcctgccagcatgctgacgtcgccagggccatgctttctggtgcgttcatgacaagatgcgggttcttgggtaaaactcattttgatctgtgataatgccttctgctctcaagagctctgcgaggcagaacagcctgtctctccgtggccgtgggaacctggcatgacagactcccagtctcagcctgttgtggggttgcattttacttgactgatgtggaaatactagtaagtcggccttgacatgagtttaagtgtttccattcacctttcccatagagtgaccgcagctgcttccttctgtcgcccaggctggagtacagtggcgcgatctcagctcactgcaacctccgcctcctgggttcaagtgattctctgcctcaacctccttagtagctgggactgcaggcacgtggcaccatgcccggctaattttttttttgtatttttagtagagacggggtttcattaggttggccaggctgctcttgaactcctgacctcgtgatgcacccccctcggcctcccaaagtgctgggattataggcgtgagccactatgcctggccttcctgaggaatgatattatgagaaaaacttgggactgtaatgtccccccacaaactaagaaggtgctgagagaccagaggatggctcagactagggaccaacccagtttgaggagtagttgggtttgtcagaagatggcttggaccagagtccagcttgaggagtagttgggcttgtcagaggatggctcggaccagagtccagcttgaggagtagttgggcttgtcagagaatggcttggaccaatccagcttgaggagtagttgggtttgtcaggacttatattcagcgcactcctggacggcggcaggacagctctagagaaccgccccaccacctgtctctaaggtgcattgaagctcgttttctggctctttgcctgctgtgtttgagtgatgagactcttttccttggtgagttctcagatcctctctgggatatttgggttctgaggaacacctgctgggagacccatcccactacaagtgacacctacaaataaaaattagatgagaaactgatctgtacagtagcttgtgggttttttcctttttcctaaagctttttggtggcatgagcgacttagcattcctgagctactataacctggtaccagataggttaaatttaaatcaaagttagaaaatcttgtggatttcagtcctcttggtcttattttttaaaaagctaagaatgcctttcctcccccatcacattcctcagaataggatgcttctgggtccctctagaccctctggtattggagattggcaggcaagacaatccataagacctcccttggaaaccacttttatttaagagaaaaaaattgggctgggtggggtgactcatgccagtaatcccagcactttgggaggccaaggcaggtggatcatgaggtcaggagttcaagaccaacctggccaagatggtgaaaccccatctctactaaaaatacaaaaattagctgggtgtggtggcggcgcctatattcccagctactggtgaggctgaggcagagaattgcttgaacctgggaggcggaggttgcagtgagcgagatcataccattgcactcaagcccaggcgacagagcaagcctccgtctcacaaaaaaaaaaaaaaagaaaaaaatctgactataaacttgttccctttcaaatagaagtgcaagaggaaaaaatctggttcatctaagggtcctgattgggtttggtgaacgctagtgtagctgtggtcaggtgagcagtaacttctgcagcgttcctcaggttaggagcagctcacaggggtcctggtgggcccaagccatatgctcacccgcccctctgaagtggatggtctgtgccattcacagttgcttggagaccatgatgtccataaataactttggttttatggtttttcagattttgttcaaatgtttgttttgaggggatttcagaaaaactcagatctgagaagaactgtggagcctgaaaaaatgccgcaggtaggaggaaaagtcaagtgaagagtttagcggaaggagccgtccttattccaagtgttgaaatgtatttacgtgtctctctattgaaacgtgctgtttgtacctatttacggggtacatgtgatacttgttttgtgcatagagtgtaatgatcaagtcagggtgtttagagtctccgtcacctccagtatgtatcatttctgtgtgttggcaacatttcacatgttgcagttactttgaaatatacaatctgttgttaactatagccgcctcactctgctgtggaacattagaacttacttcttctgtctagctgtatgtttgtacccattaaccaactctcttcgttcccccactgcatatacccttctcatctctggtatctctcgttctactctctacctccacaagagccactttttagctcccacatatttgtgataacatgcaatatttgtccttctgtgcctggcttatttcacttaacataatggccttcagttgcattcctgttgctgtgaatgacaggatttcactttaaaaaaaaagaatagctggccgggcatggtggctcatgcctgtaatcccagcactttgggaggacgaggcgggcggatcacaaggtcaggagatcgagaccatcctggctaacatggtaaaatcccgtctctactaaaaaaatagaaaaaattagccgggcctggtggcaggcacctgtggacccagccactcaggaggctgaggcaggagaatggcgtgaaacctggaggcggagcttgcagtgagcccagatcgtgtcactgtattccagcctaggcgacagagactccatctcagaaaaagaaaaaaatagctgaggttgggctcaatggctcatgcctataatccagcactttgggaggctgagactggtggatcccctgaggtcaggagttcaagaccagcctgaccaacatggtgaaaccctgtctctagtaaaaaaaaaaaaaaaatagccgggcgtggtggcacatgcctgtagtcccagctacaggcgtggaggcaggagaattgcttgaacccaggaggcggaggttgcagtgagccaagattgcgccttgcactctagcctgggtgacagagcgagactccgttaaagctgaccagtattccgttgtgtgtatataccacgttttctgtatccggtcatctcttgttgggcacacaggttgatttcatatcttggctattgttaatagtgccacaataaatgtaggagtacagatgtctcttcagctggctgatttcctttcctttggctgtaagcccagtaatgggattgctggatcatatggcagttctggttttttttttgtttttttgtgtttttttgagacggtgtctctctctgttgctcaggctagagtgcagtggcgcgatttcggctcactgcaacctctgcctcccaggttcaaccgattctcctgcctcagcctcccgaatagctgggattacaggcatgcaccaccatgcccagctaatttttgtatttttagtagaggtgaggtttcactctgttggctaggatggtctcgatctcttgacctcatgatctgcctgccttggcctcctgaagtgctgggattacagatgtgatccaccatgcctggtgaaagtgagaccctctgggctggtagttctgtttttagaactacccaactatttagaaatctccatactattttccataatggctgtattaatttacattctcactgatagcatataagagttctgtttgcattctcaccagcatttgttattttttgttttcttgataatgataattctaactggagtgaaataatagctcattgtggctttgacttgtatttccctgatgattagtgacattggcttttttttttttttttttgagacagagtcttgctctgtcgcccgggctggagtgcagtggcgcgatctcggctcactgcaagctccgcctccggggttcacgccattctcctgcctcagcctcctgaatagctgggactacaggcgcccaccaccactcccggctagtttttctatttttagtagagatgggctttcacagtgttggtcaggctggtctcgaacttctgatctcatgacccgcccaccttggcctctcaaagtgttgggattataggcgtgggctaccgtgcctggcctttttttttcttttttcttttttttttttttgagatggagtcttgctctgtctcccaggctggagtgcagtggtgccatcttggttcactgcaagctccgcctaccgggttcaagctattctcctgcctcagtctcccgagtagctgggactatagacacccgccaccgcacctagctaatttttttgtatttttagtagagacagggtttcaccttgttggtcaggctggtctagaactcctgacctcaggtgatccacccacctcgacttccgaaagtgctgggattacaggcgtgggccacagttcccggcctgtttctgggttctctatcctgttccgttggtctgtgtgtatgtttatatcaacctcatgctgttttcatttctgtagcctcgtagtatattttgacctcaggcagtgtgatttctatattctatagctttgttctttttcctcaggattgctttgcttatctgtgttctattttggttccatgtgaattttagaatctttttttctatttctgggaagaacgttattggtattttgatagggattgcattgaatctgtagatagttttggatacgtcccaaatttttattcccttttggaggttcctgagccagtggctcccattttgcctacactgcagtctgtgggctttgtttgaggaagtctgttttattgttaccatgagttgctctctgagtagtggtatgctttaagcccaggagatgtgaagaagggaaatggacaatggtaccttctcaccgtcttctggctccagaggcatcaagggtgaaagtccttagttccacagcccagattcaaggcctgagctttcctctcttcactgaagtacttcagcaaaactctgcgtgcaaaagtgtcctgcccagccctaggctcatggcctcaggccatgctgagagcagtcttagggtaattccagaaagttcagccttttcactctgtctaggtcccttcggtactggagtaatttctaggtctatgagggtttttaaagttgatctctttgtaaagtccatttctttttcttttttccgagacggagtctggctctttcgcccgggccggactgcagtggcactatctcagctcactggaagctctgcctcccgggttcacgccattctcctgcctcagcctcccgagtagctgagactacagggcgtccgccactgcgcccggctaattttttgtatttttagtagagacggggtttcaccatgttagccaggatggtctcgatctcctgacctcgtgatccgcccgcctcggcctcctgaagtgccgtttctttactttagagtaacaagtaataattctcttgtgtgatgcaggtatcacacaaattacagaagattaccaagatggtaactcacattctattttgacaggtcacggttgatgtactgcagagaatgctgatttgtaagttaattgcactgcagcccagactgtaaatgacttagtttgcttattagcaattgtatcagttttctgcctttccatttgaggtatttctcctctgtatgtttcactgtgcagagtcctggtactggaatgcccttgttttggcattttcagagctgtgaagggatacctcatgaatctgtgggtcacagggaagcattttcttgtctgtgtgttttgattaaggcctacagattgtagaagtcttgatggatgtgggccctctggggggttgaagtggatctgttgtctgaaagcgcctggggattgtttctggtgggctgccgccgtgtgctgacatctgttttctgttcctggctctgtcttcagttgcacttgacgctttggctgctggagtacaggaggagtcctccactcacaagatcgtgaggtgctggtatgttcctgagggtggcctgcctgagtgtgcagcagggaggtgtctgccaaattaaagagccaagatattttaaacacttccagagcttcagcagcccgctcctgagcacacttcctctgccagttacgataacgtgcgtgaggaggaggcgaccatgggaaagcccggggaacgctctggtcagccttttcctgtgaggatgaggtcggaaggtgcgcccactgcagtatcctgttccgcctctggaagtcctgcaccaatgtttgtcccactcactgtgacctcctcctgtgtggagtctccccttgctcctccttccctgggtgtgattcaggctctagagctggccctgcctctcagccccccacatttctagaacacactgtagctgtgcctctacagactcccgctgcctggcctccacagatcctgctcagattcaccagtaggcaaagcttggccctattagctttttctctccatggctctgtggagatgtgcggagacccttacaggtcgggaggcggaagctgaggagtgggggctgggtggaaggtggacatcggggtttggtggaaatggggctctggggtttgcttccctctagtgtgggcaggggaccttgaagtgaagtcttgagaaaccagtagaatttgccactgtttccaggccttgtcaaccttttcattctttattttgctcctcatttcccatccctcacagtaactgtttaactgctcaattaaatgtgttgtaccgttcggtacttttactgaaacagtgaataaagcactgtgtgatttcctgaatgtttacatgtgcatcagttagcttgggctgctgtaacaaagtgccagagactgcggtgtggacggcagatgtgttctcacagcagtggaggctggaagttggaggtcagggtgcccctagggttgggttctggtgaggaccctcttcctggcttgcaggagacctactttttctgtgtcttcatgaggtagagaggggagagcaagccctctggtgtcttctccgggcagtcatctcatcatcacctcagccttatcaacaccccaccttgagaggctgggcttcaacagaggaactttgtggggatacagtttagtctgtggcaagggcttttttttataatctgtgtgataagattactcacactgatgtcctgagagtcaggtaacaaccactgacctgccgatttttatattttgtaattagttgccaattatttatttatttatttatttttgagacagagttttattcttgttgcccaggctggagtgcagtggtgagatctctgctcactgcaacctctgcctcccaggttcaatcaattcttctgcctcagcctcctgagtagctgggattacaggcatgcaccaccacacctggcacaagcctatagttttgtattttctatttttaagtagacatggggtttcactatattggtcaggctggtctcgaactcctgacctcaagtgataacacccacctcagcctcccaaagtactgggattacaggcgtgagccaccgcacctggcctgccaataatttaaaatcagacatcctccaacagtcttggtggccagcttcccttgcacactgggggctgtggtgtcccaaagccctgccctgtgaggaaggacagcagggctgagaagtgaatctccacgatgtcccacaccctgttgtgtgagtgtcttgagtttgcacagagccgacgtggcctcgttgggtgtgtgaccctggggcagttcactgaaccgccaggacccttgattttctttctttctttctttatttttttgagacagagtctcactgtgtcgcccaggctggagtgcagtggcacgatctcggtttactacaacctatgcctcctgggttcaagcgattctcctgcctcagcctcccacatagctgggactataggtgtgtgccaccatgcctggctaattttttttatttttctttttttgagacagaatttcgctctgtcgcccatgctggagtgcagtggtgcgatctctgctcactgcaagctccgctccctgggttcacaccattctcctgcctcagtctcccgagtagctggaactacaggtgcccaccaccatgcccggctaattttttctatttttttagtagagatggggtttcgttgggttggccgggatggtctcgagctcctgaccttgtcatctgccccccttggcctcccaaagtgctgggattacaggtgtgagccaatgcgcctggcctaatattttggtatttttagtgtagatggggtttcaccatgttagccagggtagtcttgatctcctgaccttgtgatctgcccgcctcagcctcccagagtgctgggattacaggcatgagccaccgtgcccggctggacccttgattttcttacctggggaatcggcataaagtgccgcttgctggttgcaggttgtaagcctcacgagagggtctgggtttggtttggtggtctgtataggcctgctgggatgtggcaggctaacagacctcaagtgctcttgccacctggctctgtgaccccattcacccccagaacatcgtgttctctcacacagatggcccaggaaaccttagtcccttccattccttcctcatcttcatggacagagctggcctcagtccctgttgtgactgtttgaggccctggtgtgctgggctcttctctcaggcttggcacgaccctctgggggagttccgtgtcacagagggtgccgctgaggccccgtcgggttggctcccggggctccactcccgggtgcggcgcggcctgcccttcccaacctgtttccttctgctccactcccgggtgtggcgcggcctgcccttccccacctgtttccttctgctccttcgcttctctgctccgtgggtttcgccgttgccttgccccctttctcgttgaactgccacctccttggattcagtttcaagtctgtggttatagtggcctggccaagaaagccccttccttgcttaaagaagggatgagcctgagccacagtttgtgctgggattggtgggtggcgtgcaaggcaccctccctttcctgacccctctttctgctgcattggcaggttcggagtgttcagtggacacacgcttggcagtgtaatttccacagatcctctgaagaggttcttcagtcataccctgactcagatactcactcacagccctgtgctgaaaggtaggcccagtgtggaggctgctcagttgctacccattttggggattgctgttgccttgttgccttggtaacgctgactggagatgccaggaattctaggacctcttttacgtctgtcttgaaccagagactgggtcctcagatgcctgagattgttactaaatatccttttacctgaaagcaacagatttttataagaaaattcagaattatgagtggacaaaataattgtcattaaaatagaaatatcttttttgtttgtttgtttgagtcagagtctcactcacttgcccatgctggagtgcagtggcgtgatctcagctcactgcaacctctgcctcccaggttcaagcaattctcgtgtctcagcctctcaagtagctgggactacaggcgccaaccaccacacccggttaattttttgtatttttagtagagactgggtttcaccatgttggccaggctggcctcgaactcctgaccttcggtgctccacctgccttggcttcccagagtgtcgaagtgttgggattacaggtgtgagccaccgcacccagcgtaaaatagaaatatctttattttatttatttatttatttatttatttatttatttatttattggagatggagtcttgctctgttgccaggttggagtacagtggcgtgatttgggctcactgcaacctccacctcccgggttcaaaccattctcctgcctcagcctccacagtagctgggattacgggcatgtgccaccatgcccggctaatttttgtatttttagtagagacgggctttcaccatgttggccaggctggtctcgaactcctaatctcaggtaatccgcccgtctcggcctcccaaaatactgggattacaggcgtgtgccgctgtgcccagccgctgtctagtcttttaaaacttggtgtttgagcatgcacattctccttctggaatacctgatcacccagcacaactcacgttatctttctgctggctacccttgccttgctgtgactgtgtcatggttctcagctagactcggtggcgtgtttgatggcccaggcatcgtctgcccagtgggtgtcctgttacccatgtatgacagactgtacccaagatatcagtcttacgaataaggccacgatgaacactttgagctttttctgtatctagcatatccccagggtagatgctcaggcaggaaactggtgggagatgagggatacacagatggctcccaacaggtgctgtgaggtgctcaggagtttatcatcacttgactgagctgagcttcctttgaacagcatccccaccatgattggtttattcccagtttatcttattttatgtatttatttatttttttgagacagagtcttactctgttgcccaggctggagtgtggtggtgcgatctcagctcactgcaacctctgccgcctgggttcaagctattccctgccaagcttgaattacaggcgcctgccaccatgcccagctactttttgtattttgagtagagacagggtttcaccatcttggccaggctggtctagaactcctgaccttgtgatccacccacttcggcctcccaaagtggtgggattacaggcgtgagccacctagcctgaccttactgacagtttaaaagcaggaaaattgaaatgcagttggtacattggaaaatatttattgtgaatatgacaaagcattacaagtaagtaaccgggcctgagaaacagaattgatgatatagcaaataggcaacaaacagggagatggtgaactttaataactgaaaaagtacatattaagatctgtcttcacactgaagctttgaaacacaactttttggccaggagcagtggctcacgcctgtaatcccagcattttgggaggctgagacgggcaggtcacgaggtcagaagttcgagaccagcctggccaaaagagtgaaaccccatctctactaaaaaatacaaaaattagccgggcgtggtggtgggcgcctgtagtcccagctactcgggaggctgaggcaggagaatcgcttgaacccgagaggcagagcttgcagtgagccgagattgtaccactgcactccagcctgggtgacagagtgagactcagcatcaaaaaaataaaaatacaaaaagtatctgggtatggtggcacacgcctgtggtcgcagctacttgggagactgaggcaggtggattgcttgagccagggaggtcgaggctgtggtgagcactgcactccagcctgggtgatagtgagaccctgtccaaaaacaaaacctgtgggcggcaagccacccaggcaccaaggcaagagaccgaggacacgagctgttctagtataataaaatataaaacaagaatagttataccagatatagatcttagatatgattacatatgaatatcattaatcattagttggtagtaattactgtttattgcaatattataataatcctcgctctataatcataacctaggaaaagccaggccatacagagacaggagctgaggggacatggtgagaagtgaccataagacaagagtgtgagccttctgttatgcccggacagggccaccagagggctccttggtctagcggtgacggcagcgtctgggaagacgcccgtcaccaagcggatcgtggtccagcggtagcaaaaggtgtcaaggaacaccactcactacttagaccgggaaagggactctccctttccccccgggagtttagagaagactctgctcctccacctcttgtggagggcctgacatcagtcaggctcacccacagttatccggaggcctaaccgtctccctgtgatgctgtgcttcagtggtcacgctcctagtccaccttcatgttccatcctgtacacctggctctgccttctagatagcagtagtaaattagtgaaagtactaaaagtctctgatatgcagaaataatggcataagctgtctttgtctctatctcctctccctctctgcctcggcttccaggcagggaagggccccctatccagtggacacgtgaccttacctatcattggagatgactcacactctttaccctgccccttttgctttgtatccaataaataacagcacaaccagacattcagggccactaccggtctccgcgcattgatggtagtggtcccccgggcccagctgtcttgtcttttatctctttgtcttgtatctttctttctacactctctcgtcgccgcacacggggagagacccaccgaccctgtggggctggtccttaacaaaaacccacaactttttgatctctgacttgaagtttttgtctgtttctccccctgcagcatctgatgctgttcagatgcagagagagtggagctttgcgcggacacaccctctgctcacctcactgtaccgcagggtgagtggatgtggtattatacctgcttctgagctcgtggcggggggattaagatctgcctagtacttgtcatgctgcctgccgtggacggcacatcgagaggttcagggatgtctggtgagatgtggctgtcctcatcaaggccaccactcaggtcaggagactgaacttgtcccttgggccgagcccctcctccttgagatagggagaattctctccaagcaggtgctggccactgtgaggggagagacgccacggtgtgagctgtcacagctccatgtgttacctttgcagtgggaagtgagggggctgcggtggccaccggctgggaggaaggtgaggggtcatctgtcgcacattggtttgcttggatattgaagggagcggatgcttttatttcagctctttgtgatgctgagtgcagaggagttggttggccatttgcaagaagttctggaaacgcaggaggttcactggcagagagtgctctcctttgtgtctgccctggttgtctgctttccagaagcgcagcagctgcttgaaggtgagcttttacgcgagcccggtggtgctggtcaagagtgtgtgtaggggggtgtcagcagagtcccagctgactgtgggtgagcctctcagtgaagcccttccctacctgcccggaacctgcagtgcctcctgtcgatggaacattctttgtcagacgcttccataagcactgactgctgctctgagaggccagagtgtccactgctgcttcattcaggtctctagtggtttgcacttgacatgctgtaattgctgtgtagtcttttaaaacttggtgtttgggtgtgcacagtctccttctggaatacttgatcacccagcataactcacgtcatgttcctgctggctgcccttgccttgctgtgactatgtcatggttcttaactagactgggtggcgcgtttgatggcccaggcattcgagagctgccagctggacagcatggtcactgcgttcctggttgtgcgccaggcagcactggagggcccctctgcgttcctgtcatatgcagactggttcaaggtaagtgacctgccaatcggctacctaatacctgatcttcccagaaggcctgggagtggggaccatgctgtccccacctgattctctgtcatgtgagtgagcaaccttgctgtcagctttgccgagtggccttggcagatcttcctctgcgtgtgccgaggagcctgggttctccctgtcggggcctcagcggatcttcctctgcatgttccgaggagcctgggttctccctgtcggggcctcagctccttcccctggtttctgtctcacttagttgacggagcctcctgctgtcttttataagaaaattagcgaaatcaagcctggacaccatagtgaaacctcatctccaccaaaaaaaaaaaaaaaaaaaaaaaaacacacacacacacacacaaaacaaaaactacgcaggtgtggtggcagacacctgtagtcctcgttactcgggaggctgagacgcaaggattacttgagcctgggagatcaaggctgcagtgagctgtgattgcaccactgtacgccagcctgggtgacagaaggagactccatcccaaaaagaaaaaaaagaaaatgagtgaaatcaggaaagaggggacacagaagtggatgctgctttttgcagagtatacaatgtctcttattttccctttttttttttttgagatggagtcttcctctgtcgcccaggctagagtgcagtggtacagaaagctcaccttctcggctcactgcaaactccgctgccccgtttcaagctattctcctgcctcagcctcctgagtagctgggattacaggtgtgcactaccatacccagttcatttttgtatttttagtagagacggggtttcaccatgttggtcaggctggtctctaactcctgacctcatgatccgcccgtcttgtcctcccaaagtgctgggattacaggcatgagccagcgcacctggcctttcctttttatttatttatttatttattttatttatttacttatttatttttttgaggtggagtctcattctatcactcatactggagtgcactggtgcgacctcggctcactgcaacctcctcctcctgggttcaagcaattctcctgcctccgcctcccgagtagctggggttacaggcgttcgccaccacacctggctaatttttagtagagacagggtttcatcatgttggtcaggctggtctcaaaatcctgaccttaagtggtccgcctccctcggcctcccaaagtgcagggattacaggcatgagccaccgtgcccagccttgcgtctctaattttcacgtaagtcctgaaacaagtacttcatttcttcagccgtatcacatattcttcctttttctttggaacacacacagtgtgctctctgacagaagtttatgcagctgttcctgaacctaagtgggcattagactcgcctggagggggctttggaaataaagatccagggcccatttgagactactgagtctgagctcctgagacctcagggatccctgggcaacccctgtgaaaacccccagttcatgtggggagttgggtgtatttgagatatcagctttgaaggaccgccatggtttctcttttagtgcttgtgagtaaagtttccatttgaagagctaatttttgtagaagttttgggttcgggccaggtacagtggctcatgcctgtaatctcagcagtttgggaggcctaggcaggaggattgcttgagcccaggggttcaagatcagcctgggcagcacagtgagaccccggtctctacagaatgtaacaattagctgggtgtggtggtaagcacctgtggtcctggctacttaccggctgaggcaggatgattacttaagccgaggaggttgaggctgcattgagctgggattgcattactacgctccagcctgggagacagagcaagactctgtctcaaaaaaaaaaaaaaaaaaaaaagtattgagttttcctgccatcaccacctcggtgaagtagttgcctctttgtaggagtctcagctccctgaaattttcaagggctgcggtgcctgcatcgccatcgtggctgcggtgcctgctccccccccaggccttctgaggagctgaggctgcacaggaggctgagccgcatctgcttgtgttgggagaaggtggtgactggtgcagtgtcagtgtcaactcacttctattccttaaagttccttctcacctgccctcaggctctccccagctctgcccagttagcctggggcttccactaaactaagaggagaggtgtttgttctgtccttttagtgaggcgctgagagatttgtgccagaatccacctggtgctcttgggtcaggagttgatgggtctccccgagccgcggctcaggtgtctccctgggctgctttttcttcggttccagaggcgacagttgggagaggaatactctgaagtgctgtgttggtggtggtgttttggttttgtttgcttttcttttaccttttcaaatcaactttatcaaaatatagtttaaatgaaataatgaaaggtatccaatttaagtgtaccattaaatgaggttttttgtttttttctgtttgtgttttcttttaagagactgagtgttgcccaggctggagtgcagtggcatgatcatagctcactgcagcctttacctcctggggtcaagcagtcctcctgcctccgcttccagagtaactgggactataggtgtgtgccaccacacccagctaattaaaaaaaatttttttgtaaatacaatgtcataccgtgttgctcaggctggtctcagattcctggcctcatgcgatccccgcaccttaacccccgaagtactggaattacaggcatgagccaccatgtccagatagttagatgagttttgataaatgtatatatgcatattcagtgtttgaacatctgtttttgttatgttttgttttgtttttgagatggagtccccgtctgtcaccaggctggagtgcaactcccacctcctgggttcaagcgattctcctgtttcagcctcctgagtagctgggactacaggtgcctgccaccacacctggctaatttttgtaattttggtagagatggggtctcaccatgttggccaggatggtctcgatctcttgagtttgtcatccgccccacttagcctcccaaagtgctgggattacaggcatgagccaacgcacttggcctgaacatctgttttaatttttacttttgagggcaaataccagcactgtgggaggacgaggtgggccgattgcttgagcccagtagttcaagaccaccctgggcaacgtggcaaaaccctatctctaccaaaaatacaaaatttagctggtatggtggcaggtgcctgtaatcccagctactcagaaggccgaggcaggagaattccttgaacccggaacgcgcaggttgcagtgagccaagatcagaccactgcactccagcctgggcaatggagcaagaccccgtctcaaaaaaaaaattttttttttttacttttaggaaatgttaatataagtagaccaaatgatcgtgaatttgagccctttggggtaattaatataattctcagcatatcacattatgtagttaaatgtaatttgtggggtttttttgtttgtttttttgaggcaaggtctctgttctgtctcccaggctgggatgtggtggtgtgatcatggctcactgcagtctcaaccttccaggctcaaatgatcctcccacctcaacttcccgagcagctgagtccgcaggtgtatgtcaccacacctggctaattattaaaaaattttttgtggacatagtgtctcactatgttgccctggctggtctttttgtttttttaagatggagttcgctcttgttgcccaggctggagtgcagtggtgcgaccttggctcacggtaaccacctcccgggttcacgccattctcctgccacagcctcctgagtagctgggactacaggcgcctgccaccacacacggctaattttttgtatttttagtagagacagggtttcaccgggttagccaggatggtctcgatctcctgaactcgtgatctgcccgcctcagcctcccaaagtgttgggatcacaggcgctagccaccgcgcccggccgtcctggctggtcttgacctcctgggctgaagtgatcttcctgcctcaacctcccaaagtgttggaattaccggattgagccactgcacccagccattaagtgtaattttttcaaaaatagcaaacagaactgccttttatctcagcaactctaacaatggctgctgtgaccccaggtctggcttgcgcgtgtcacttagatgctttacagaaatgcctttggcgacgggtctggactgttcctgctgcggccagtgatcatctggctcactgttaattgagtgaacgttgccaagagacaggagcagttgtgttgtggatggctgaatggagggtgataagacatggtgtgcttggcgggagaatttcaggttgaaactgggtgctgatgttttgagaagggaacccttgagtggtctcaggttttatttaaatttttaactgacaagtattgagctgctttcctggtatttggcacagacagttcatgtctctgagctttgtttttccgtgactctgtccctctcagagacatttgacaagcgttatcagcattttccgctttttatctaatggctttttgggtctgtctgcatgatgataacattcaaaagaatctacacatggtcaggtgtgatagttcatgcctgtaatcccagcactttggaaggccgaggcaggtggatcacttgaggtcaggagtttgagaccagcctggccaacatggcaaaacctcatctctactaaaaagacaaaaattagctaggtcagacgtggtggctcatgtctgtaatcccagcactttgggaggccaaggtatcacctgaggtcaggagttcaagagtagcctggccaacacgatgaaaccctgtctctactaaaaacacaaaattagccaggcatggtggtgcacacctgtaatcccagctactcaggaggctgaggcaggagaatcgtttgaacctgggaggcggaggttacggtaagccgagattacgccactgcgctccagcctgggtgacagagtgaggctttgtctcagaaaaaaggaaaaaaaaaaccgggcttggtggcacgtgcttgtagtcccagctacttgggaggcagaggtgggagaatcacttgaacccgggaggcagaggttgcagtgagccctgattgcaccgttgcactccagcctggatgacagagtgagactctctctctcaaaaaaaaaaaaaaaaaaatagctgggagtggtagcaaatgcctgtaatctcagctactagggaggcaggagaattgttcaaacctgggtgggcggacgttgcagtgagccaagatggcaccactgcactccagcctgggtgacagagcaagactctgtctccaaaaaaaaaaaaacaaaacacaattttgcacgctttcagaaagaccaaggtgagccttcagttcacgttggagttcaggtttcctgatagatggtaacttgctgaggtttcaccaggatgtcctgtggtctcaagtggggctagggtggcaggagctcgtctggttttgcaggtaagcggttcagtgttcacagaggcccacattctgtctgcaggttcactatgatgcgttcagggccatgcccatttaaaatctccttccttccctgactcactgcagcccccaggactttgctgcagcccccttcgttcctgggagggtttgctcatgttcctcgcttgctctgctagggtcttgcagcttcattgtctgaggggtggccctccttggcctgtgttccttacccacctctcttgcagtgatctgtccactggtggatgaggttagaagttaaagtgtgttcagaagtggcttcatcccacaaaatcaatttgtttgctgtgcacaaacacttcttagggcatttagcaaattgtacccctaaggatcccaaaaggatcccatagttagtgtttgttatagctaatgatttttaactgtttttcttcgaataacttttagatatctcttcagtcaaagcgcagtcgtgacatctgtaaatgtatgaaccacatgactttttggtgtttctcttttttcctttttgtttaggaggccgactacagcagccgcccggacactgcctaggtgggcttcacactcttctctccacacaggacactgcctaggtggtgcagctgcgcctggctgtcctgggcttcacgctcttctctccacacaggacactgcctaggtggtgcagccgcgcctggctgtcctgggcttcacgctcttctctccacacaggcctcctttgggagcacacgaggctaccatggctgcagcaagaaggccctggtcttcctgtttacgttcttgtcagaactcgtgccttttgagtctccccggtacctgcaggtgagaagctggctgccacatccatgatttctggtgcttcgctcacctgctgcatctgaggactgccttggcctccccaagagcctcctgcagatctgctctgagcctctcagccaggcccttccccttccccttccccttccccaagccgtttatggtgaaacaacacaaacattgcaactggaggtgtccacgtggacacacagtgagtgcgtgtgtgccagtcaaggcaactgctaagaaacccttttctcacctaggccaaggaggtgggtagatatattatgtcactgttcagtctccctcaaaacagtgagcaggtctgagtggtgacgtggagagacgttctcagcacccagttacgcaggaagagcgagttgtactgcagtgagggttttaggatctcatgtttgcttttttttttttttttttaatttcatgtgggttttttttttgtttttttgtttttttgggtttttttttttgagacagtctcactctgttgcctaggctagagtgcagtgttgccatcatagctcactgtagcctagacctcccaggtcaagcagttctcccacctcagcgtcctgagtagttgggactacaggcgcatgccagcaaacctggctgttttttctttttttcttttttttagtacagatggggtcttgctgtgttgcccaggctggccttgaactgagctcaagtgatccttccgccttggcctcccaaagttctgggattacaggtgtgagccactgtgcccagcctgaccctcatcttttaagaaaattggccgggcgtggtggctcacacctgtaacccagcacttttggaggctgaggagggcagatcacttgaggtcaggagttcgagaccagcctgaccaatgtggagaaaccccctgtctactgaaaatacaaaattagccgggcgtggtagcgcgcgcgtagtcctagctactcaggaggctgaggcaggagagttgcttgaacccgggaggcggaggttgcagtgagccgagactgcaccattgcactccagcctgggcaataagagcaaaactccctctcaaaagaaaaaaacacgctgtgtcccctctgtcccctttgaccaggaagtcaaaggcatggagctgcaggcggccggggccggttcctgctgccgctgctaggattgcacatccctggttcccccagtgagccgccctggacttgcaggaccagctacattagggtttcttgatttttcacctggggaagcagccttctattgtgttttttttttgttgtttttttttttggaaatgaagtctcactgtgtcacccaggctggagtgcagtggcgcgatctcggctcactgcaaggtccgcctcctgggttcccgccattctcctgcctcagtctcccgagtagctgggactactggtgcccaccaccgcgcccggctaatttttttgtatttttagtagagacagggtttcaccatgttagccaggatggtctccatctcctgacctcgtgatctgcccgcctcagcctcccaaagtgctgggattacaggtgtaagccgctgcgcccggcttgtgttttaattttactaatggtttgctttgcatactcataagtctgactgtaaagggctgtgtttctctactcagcactgtggatgttggaagtgaattgtggcctccctggagtcccaggcagttcccagactaacggtgctgcgctctgctatctatcctcaggtgcacattctccacccacccctggttcccggcaagtaccgctccctcctcacagactacatctcattggccaagacacggctggccgacctcaaggcaagctgtccctccatgcccactcctcacacctgtcccagcagaaactgctttgttttcttgttctcattctgtgtcttccctgaaggtttctatagaaaacatgggactctacgaggatttgtcatcagctggggacattactgaggtaatgttgcttgagccctgcagggtctcagccagtcacgcccaccatgcaaaggtccagtttcttttgactcttgagttgagtttttcagccttcccagtctcatgtctggtcttgcctcgggcgcagctgggggcgaggctctgcgggcctctgtgttgctgtgtcccaccttgtgtgtccccagcattggcagggaaagggttactgtgtggcagagtgaagtgcctcaggctgcaggacatttgtccttttgggagatcttggttcctgtggggttgaatggagaggtggttcgtcatgtttttctctgaatcacagaaaagtgttaactttttttttttttttggagatgcagtcttggtctgtcaccaggcttgagtgcagtggcgcaatctcggctcactgcaacctctgcctcctgggttcacgccattctcctgcctcagcctccagagtagctgggactacaggagccgccaccacgcctggctaatttttttgtatttttaatagagtcagggtttcgccatgttagccagaatggtctcaatctcctgaccttgtgatccgcccgccttggcctctcaaagtgctgggattacaggcgcccgccaccacgcctggctaattttttaattttttttagtagagacgaggtttcaccgtgttagccaggatgatctcgatctcttgacctcgtgatctgcccgccttggcctcccaaagtgctgggattataggtgtgagccactgctcctggccaagtgttaactgtttttatagcagccaaatgtcagatggtcatgtgatatgtgtgggtcactaatgaaaacattcttttttttttttgagatggagtctcgctctgtcgcccaggctggagtgcagtggcgcagtctcggctcactgcaagctctgcctcctgggttcacgccattctcctgcctcagcctcccgagtagcctatagtgggcctacagatgcctgccaccacgcctggctaattttttgtatatttttagtagagatgaggtttcaccacgttagccagtatggtctcgatctcctgacctcgtgatccgcccgtctcggcctctcaaagtgctgggattacaggcgtgagccaccatggccggcctaatgaaaacattctttactttttacttttttttttttttttgagacggagtctcgctctgtcgccctggctggagtgcagtggtgcgatctcagcttactgcaagctccgcctcccgggttcacaccattctcctgcctcagcctctccagtagctcagactacaggcacctgccaccacacccagctaatttttttgtatttttttagtagagatggggtttcaccatgttatccaggatggtctcaatctcctgacctcgtgatctgcccgccttggcctcccaaagtcctgggattacaggcatgagccactgtgcccagcgtattgtttttttttttttttttttttttggaatggagtctcgttctattgcccaggctggagtgcagtggcgcagtctcagctcactgcaagctccgccttccgggttcatgccattctcctgcctcagcctcccgagtagctgggactacaggcacccgccaccacgtcaggctaattttgtgtgtttttagtagagatggggtttcaccgtgttagccaggatggtctcggtctcctgacctcgtgatccgtctgcctcggtctctcaaagtgctgggattacaggcgtgagccactgcgcctggccctccattctttactttttaagacctttttattttaaagttacgagttactgaagaacacttataggtgacattaaagtgttaggtgaaaatatttaatataattttccatttataatttattgctgtttataaattactttttttttttttttgaggtgggatgttgttctgttgaccaggctgaagtatagtaccgtgatcacagttcagtgcagcctcaaactcctaggttgaaacgatcttctcaccttgacctcctgagtaactgggagtacaagtgtgcgccaccatgcctggctggtttctaaaattttttgcagacatagggtctccctgtgtggccgagactggtcttaaactcctgggctcaagtgatccttccgccttggccccccaaaatgctgggattacagatgtgagctgccgcgcctggcctcagaatgtttttttttttttttgatgcagggacttcccctgttgcccaggctgcagtagggtagcatgatgatggcttactggagccatgatttcctgggcacaggcaatccttccacctccacgtcctgagtagctgggaccactggctcatgcctctacacctggctaatgtttttgtatttttttagagatgagatgtcatcatgttgcccaggccgggcttgaactccttgggcttaagcagtctgccccgcttagcctctcaaagcactgcgtttatagacatgagtcatggcacccagccctcgtaatttcttttaatctcaaaaattaagtctctactccttcccacctagaaatctttactttcaactctttcctggaggcaggaaagaggctcacggcaggctctcagcagagctgagctctcgaggagggccgcacatcacggggtctgaaccttgtgtgtgtggaggtggcagtgtcatcctcccctgtcgtgctggtattttgggacattttggagtgctccagggcccctgctgtgcgcacagcatgtgggcctttacctttaatgtgtacagagcctttcaacaaggaagcacaggttgagtgtggccttcactgctcagtcttttctttaaagtcctctgttctttttcctttcctccctgtatgggaaccagccccacagccaagctcttcaggatgttgaaaaggccatcatggtgtttgagcatacggggaacatcccagtcaccgtcatggaggccaggtaggctgggctgccgaaaaggcctctagcagctgcagtgtgtgcagaccgcgctctgatgcctgcagtatgtgcagactctgctctgatgcctgcagggtgtgcagactccgctctgatgcctgccagcgtctggggctctttggagtgtgtcccatttctgcccagagccacatggggcaggttggccactgtctattcagagagagacaggagtcagggctgtgaatcgaggatcctgccgttaagggatacggggtgaggtcaagagctgtgcatttgctgtgaaacattttttcctctgtaaaagcaggtgatgcccctcccgtgctgaagcagccaacaggaactgctgattggggagcttgcactgggagggaaggcagtggggccatgatgtttttttttttatcaatgccttctttgtgaccaatatggagtcagtaacagagagctgaatagcacagctttattgaatttggtatgatctcaaaacatcttgaattctggtggttacacatgtggatgagctgattgcagctcccagggttttgaaatttagctccaaggaaattgccccaaatggaccttacatggtcctcgtggcctcagattgatccaggctccacgttcaagcccagggagcaggccgaatgtggtcctgattcccacggactcagggctgggctagcacggcctgccctacacatgccttgtcccggaactgtgcacaagaagacttcataatgcatcgtggctttggagtgagccctcgcagtccactctctgaaacaccggtcaccgtctgtgggaattgccttctcgctgctctgactgatgcactgtctgcttctctgtgttgcagcatattcaggaggccttactacgtgtcccacttcctccccgccctgctcacacctcgagtggtcagtatgcgtctccatgagtttgtgaccagttgtgtagaaagcaaggactttccttgtcagtctctcacaggtctcttctcttcccacagctccccaaagtccctgactcccgtgtggcgtttatagagtctctgaagaggtatgcagcaacggttagaaggggatgactacttccaggtttcttctgacaatgcgaagaattgtggatcttctgtagagaaatttgttagaccactattgtgttttattggtaaaatattggctccaaaattggttggttacttttttttttttttttttttttttttttttagttggagtctcactctgtcacccaggcttggagtgcagaggcgagatcttggctcactgcaacctccacatcttaggttcaagcgattctcttgcttcagcctcctgagtagctgggattacaagcctgtgcctggctaagtttttttttttttttttttttagatggagtctcgctctgttgcccaggctggagtgcaattgcacaatcttggctcactgcaagctctgcctcctgggttggagcaattgtcctgcctcagcctcctgagtagctgggattataggtatgcaccaccacgccctgctaatttttgtatttttagtacagacagggttttgccatattggccaggcggttctcaaactcctgagctcagaagatgatctacccacctcatcctcacagagtgctgggattacagatgtgagccaccgctcctggcctttttttttttttttttttgagatgaagtctcactctgttgcccaggctggagtgcagtggtgcgatcttggctcactgcaccctccacctcctgggttcaaggaattctcctgcctcagcctcctgagtagctgggattacaggcgcgcaccaccacgcccggctaatttttgtatttttagtagagacggggtttcaccatgttagtcaggctggtcttgaactcctgggctcaagcgatctgcccacctcggcctcccaaagtgctgggattataggcgtgagctaccgcacccggctgcatcattcttcagtgaaagaaaatgtttcagtacataatgattgtgcagagaggagaactgaaggaaaatgaaagagctctgggaaagcctcatgctgcagaacttgagagtagacctggaagttattgtttagaataataaggtatccttggatcacttacattgcaggtttctagtaagaaagttggttggtatcaaccaactttggaagaaataggaaagtataagtcctatattccagcaaaatttataaagttctgggacctgtaagaagataaacacaaagagccttttttttttctttttttgtatttttagtagagacagggtttcactatgttggccagactggtctcaaactcctgatcttgtgatccacccacctcggcctcccaaagtgctgggattacaagcgtgagccaccatgctctgcaaaaataattttttaaatcttaaaataagtttattctctgggatccttactttcatttgttttgagacagggtcccactctgtcacccaggctggaatgcagcggtgcagtcatggcttactacagccttgacctcctgggcttcaacagtccttccctctccgcctcccaagtagctgggtctagaggcgtgctccaccacacccagccagccttgatctcctgggcttcaacaatccttccccctccgcctcccaagtagcagggtctagaggcgcgatccaccacacctggccagccttgacctcctgggtttcaacaatccttccccctctgcctcccaagtagctgggtctagaggcgcgctccaccacacccagccattttgtaaatgctttgaggacacggattttcgctgtgttgcccaggcttctctctctcttggcctcaaataatcctcctgcttcaacttcccaaagtgctgggattacaaatatgagccactgtacctggcttaccctttatcatgttaagaaagttccctcttactaatttgctaaggatttttagcatgaactaatgcgttttatttttttttctttaatttattttttgagtcggagtctcggtttgtcagccagtctgcagtgcagtggcgcaatctcggctcactgcaagctccaccttctgggttcatgccattctcccacctcagcctaccaagtagctgagactgcaggcgcccgccaccacgcccggctaattttgtttttgtatttttagtagacacagggtttcactgtgttagccaggatggtctcaatctcctgacctcctgatctgcctgcctcggcctcccaaagtgctgggattacaggcgggatccaccgcgcctggcccaattttgcatatttttaatgacacgaactaaacgtttttcttagtattaatcattaaaattaacaaagattcatgttttgctgggcgtggtggctcacgcctgtaatcccagcactttgggaggctgaggcaggtgaatcacaaggtcacgagttcgaggccagcctggtgaacatggtgaaactccgtctctactaaaaatacaaaaaattagctgggcctggtggcaggcgcctgtaatcccacctactcgggagggtgaggcaggagaattgcttgaacctgggaggcggaggttgcagtgagccgagatcgcaccactgcactccagtgtgggtgatagtgggagactctgtctcaaaaaaaaaaaaaaaaaaaaaaaaaagaaaaacaaagattcgtgttttgaatttggaaattaccaaaaattgtatgagagaaatagaaataatttataatttcactgcccagggataatcactggtggtattttgtggtctagctccttagatattaatatatgattaatatgatatattttgaaacagtgctttttaaatctatatatattttttaatatttttttgtaaaaacaggctcatactgtacacagtatttataatttatttaaatttaatatgtttttattttataatagatttggggattgtaatcttgaattaatttaagccatagctgacttaattgtattgttttcctgtgatccagagcagataaaatccccccatctctgtactccacctactgccaggcctgctctgctgctgaagagaagccagaaggtaagttcctgggccgcttgtccactctgggacttgtgcttttccattttcctaaccttgagtgtctgttgtgctacaccacccgagtgagctcgggggtggctgtgccagctcaagccggtgctttgggtacagggtccgcccaccatgctgacgcccagtgccagctgtggcacagactcttacctgggggtcctgaagaatcacttagcaccttccggaaaggagtgtgtgcagtgcacagccccactttgtcactcgtcatcttcctgtgggccgcactgaggtgtttgtacaggcttcagactcgggtgctctctcagcggccaccttggggcccacagcgctggctcgagcctgtcgtagggagtgtcatgcagcacttttctgttgcacagtgcaggtaggagtagaagtcaggctcttttggcctgtggggagcagtggtgcagctgtcggtcagacctacgccctcattgggaatccgtgaaaggctgcactcaggcagcagtgggagatgccatcatgaggctggtttttcttgaagtgtgtggctttatctccagtagaagccagcatctccctgtgggagccgctatgagctgaagacatagatctgaggctgctgcttccctgtgggctttttttttttgagacagagtctcgctctgtggctgtggactgcagtggcgcgattttggctcgctgaaacctctgccccctgggttcaagcagttctcctgcctcagcctctgtaatagctgggattataggcacgcactactacgccttgctagtttttgtatttttagtagagatggggtttcgccatgttggacaagctggtctcgaactcctgacctcaactgatccgcctgcctcggcctttcaaagtgctgggattacaggcatgagcaaccgtacccagccccttgtgtgctcttctagatccccttccacctgcagggccagggaggctcgttgagatttttttttttttttttttttttttgagacagagtctcgctctgttgcccaggctggagtgcagtggcgcaatctcagctcgctgtaagctccgcctcccaggttcatgccattctcctgcctcagcctcccgagtggctgggactacaggcgcccgccaccacacccggctaattttttgtgtttttagtagagacagggtttcaccgtgttagccagaatggtctcaatctcctgacctcgtgatccacccgcctcggcctcccacagtgctgggattacaggtgggagcccccatgcccggccgacccaccctgagagcatgacctctcagttgtgctggggatgccacaggggcctcagggctgtgtaccctgcggtgtgaggcgtttgcttctcttgagaggtgtcctccttcccccaggatcctccttcccctggggtccacttgttcgtagcttttggtggcttccagaatggtttctaatcatttgtctgatgaggcttatgcacagactcctagagcctatgatttctagagcctgtgatttctggtttcattttggctgtggctgtgcatagcagtgcattttcatgcttgtgtcttctccagcaaccccagaacttgaaggttttttactttaaaaacatatgcagcgtatcttcctttttatattgaaagtggtggctgggcgcagtggctcatgcccgtaatcccagcactttgagaggccaaggcgggcaaatcatgaggtcaggagatcgagaccatcttggccaacgtggtgaaatcccgtctctactaaaaatacaaaaaattagctggatgtggtggtgcgtgcctgtagtcccagctactcgggaggctgaggcaggatgatttgaacccgggaggcggaggttacagtgagccgagatcgcaccactgcactccagcgtggtgacagagcaagagtccatctcaaaaaaaaaaaaaaaaaagtttgaggaaccaggggactaaatggtcacctatccgtgatcctgtccccaccctcgccagccctcgatcctccttgttttcttccgtgtgtatgcttctcacggtggtggagtggtattgatggtgcacacagaaccgctttttttcttaaacttgtttataaatgtaattttttatgaaactcgtttataattgtaattttcgatgtggcatccagcatcagggaagacacctcatttacctcctcagagactcccagtccctccgtctgccacacacagcagcttggaagttcacagctctgtatttgactgtgtgaagtttctatttttgcagtgaagagtcctgttgagtgtctttccatctggtttcttccttcttctcacagatgcagccctgggagtgagggcagaacccaactctgctgaggagcccctgggacagctcacagctgcactgggagagctgagagcctccatgacagaccccagccagcgtgatggtgaggatggatgggagctcatgctgtgtctcatgtgtgcagcctgtggttggagctctgtggctgggccattttccccatagtgacatcaggctggtgtgtcttcctagtagtccagtagtttaaagattgaccccgggctggcgggtgtggaaccttttttgagacaaggtggaaggctagtcctactgaagctgtcacagacccttggcagaaggtgaatattcggctagttgcatctgagtaggacgaatgatgatagagaagaaaacgcgtgactaggatgcctgttttcccgctcatcctgcctgccggagtcgatgtcacatcagacacacagggtctctgccctgtgatcctgcttccatgtgatggttttctgtaaaatccagagtaagaaatgttcatctgtggattgagaacatgcagtttcttttttcttttttttttttgagacagagtctcactctgtcccccaggctggagtgcagtggcgccatctcggctcactgcaacctccgcctcctgggttcaagcaattctcccgcctcagcctcccaagttgctaggattacaggtgactgcctccatgtctggctaattttttgtattttttagtagagatggggtttcaccatgttggccaggctggttttgaaatcctgacctcaggtgatccacctgtgttggcctcccaaagtgctgggatttcagtgtgagccaccgtgcctggcctacatggaggtgatatatatatatttttttgagacggagtcttgctctgtcacccaggctggagtgcagtggcgtgatctcagctcactgcaagctccgcatggaggcaatgttaacacagcttggttagcgctagctggggctgcagcgccttggcggtcttcactcagaccaagtgcgccagttcctgagtgcagccttccggtgattcaatgatggcttgtgcagaatgtggtacatgggggacatggaggaaaagttccagtgcttaagcaagaggttgatacatgtcaggtgagtcctgtttctaaaagcaaagcggttttcacctttaaatgatgtagttgggctatgtgtggcccatttccctgggccaacatggaacctctggcatgcgcttaggcagatgtggtgtctggagggctggcatgggatttcagatggggaggttcatgttggtgaatgaacatgtccccctctcagccaatcaggaaaaggtagtggatggcgtctggccccatttgccatgacacatgctgcaccacaaggctgcaaatcctgcggggcgaacaaacactggtgttcagcacctggctgggggatgtgtgcagtcagcaggatccgtggaatcgtacttgacgggaggcggagctctctaggccgcagctgtatccctcctttcggggttcttgtcatccctaactagtttcttccttcgcagttatatcggcacaggtggcagtgatttctgaaagactgagggctgtcctgggccacaatgaggatgacagcagcgttgagatatcaaagattcagctcagcatcaacacgccgagactggagccacgggaacacatggtaggtgtaggggctcagaacaaagcagggggtcttcaccattttccattaggcagaggcattagacgcatggagccttctctcaatttctgtttgacttgctcagttagtgtcgtatcagatgttccagggccaggcagcggtgtaccagggtcagctgccacagtctgtttgtgtatgaagagctccttttacattttatttatttatttaattttggagacagggtcttgctttgttgcccaggctggagtgcagtggtgcaatcatggctcactacagctttgacatcctgggctcaagtgatcctcttgtctcagcctcccgagtagctgggactacaggcgtgcatcaccacacccggctaatttctgcattttttgtacagttggggtttctctgtgttgcctcgactggtctagaagtcctgaggtcaagtgatctgtctgcctcagcctcccaaagtgttgggattataggcataagccacggcacttggcctctttttttttttttttttttgactgagtcttctctgttgcccaggctggagtggacgatcttggctcactgcagcctccacctcctgggttcaagcagttctcttgcctcagcttcctgggtagctgggattacaggtgcacaccactacgcccagctaatttttgtatttttagtaaagacagggtttcatcatgttgaccaggttgggctcgactgcctctttagaatatgcgacagaggctgtttctggccccaaaacctaaaatatttttctggccccttacacacaaggtttgccagtcccgcctgctgctgtagaattttgtgattggcgattacttgagggctgctattcccaagattggggaatgggggccctgggcaccagtttgcattgtaacatgccctccaaacaagcctgttttggaggtctttttgcaaagcagaattgcgatgtctgtggcgggagcgctggccggcttccttcctgctgctcccgtccccaggacaccacgctcatgagaactgtgtctctgcaggctgtggacctcctgctgacgtctttctgtcagaacctgatggctgcctccagtgtcgctcccccggagaggtgaaggcgcgggcagctccctgagtggtggggctcctctgggtgccacctcttgctgggccaagtctgcagaccagggactcatgagctcgtctccgcaggagcatgcggcgatgctgagtttcatcaaataggacgcagcagaagttgggaagcactgcagaagatgggttgtcttccagaaagaccactgttttggggaacagcttggctctttcttcggccgctggtggttggattagctgttggagggatgtgcaggactgaatggctagtactgatggtttcacggctgtctctgcaggcagggtccctgggctgccctcttcgtgaggaccatgtgtggacgtgtgctccctgcagtgctcacccggctctgccagctgctccgtcaccaggtgaggctctccttcatgggggccacccttgggggcccactctgagggccaggctgctacttctcaattcgtcttcagtgccctggaaaattccagcttggaagagggcagtctgctctgccaccctcattctcgttgcagggcccgagcctgagtgccccacatgtgctggggttggctgccctggccgtgcacctgggtgagtccaggtctgcgctcccagaggtggatgtgggtcctcctgcacctggtgctggccttcctgtccctgcgctctttgacagcctcctgacctgtaggacgagggattccttgttcttctgcctgaagtgagctcttcttccacagtcgcgtcttctctcctctctctcgaaaagtgacacatgctcgtttgataaaattagaagagacagacatgcagacataccacccaaagataaccactttttagcattttggtatatatccttccagaattttatctgtcatttgtttataatatgcgtgcgtttgtttctttgttcataaaaatgagatcatattatactaaactgctgaaattaatagtagatagtaactgtctatatcgttaagcattctttgatgtcctggtgagagctgctttgttttgtcttggtcccttgtctggcccttggttggaccagctccctctggtcaggttcttcggcaccccatggtgagtagcttcccagtgtgtacacctcgggctgtttctctagggctcagcagatggggccatgtgctgaggtgaggaaggaccctgtggttaagaatggtctgctcagtgcctcaagggctccctgcagctgccacgcacaggcagaagccaggacagaatcccttcagctgccactcagaggcggaagccaggacagagggctgggagactctggtgggagttgctggctggggcttggcttgtagcttctggtctcttgggcagaggtagcccaggtcgggacagagccctgttgcggtgccggagaccctgtgcgggaaaggggagatctgacattatgacagggtctgaataacagagaacttagaagaggcgcaagaaatgtacgtggagcaaggagagggagtcagatggcagctgtgcggatcccacacctcagacatgggcctcggggagcaggcactcggtactccggggatacagagtccctcctaggcgcttggccacaccagacagtccccactcaccccaggccccaaacactgagtactgggtgttggcatgagaggcacacagccaatggagaagttgggagctggtgaggagggaggcatccaggtggcttgggggagacagggccatcctctcttagaaacacagagatgcctcaggatatatatccaggtgaagaaagcaaaatactgaactcggtctcagatgctactttttgcataagaaagggagaatgaaatatatatttggtgtgtgttttgtttttttttttgttttttggtttttggtttttgttttgagacagagtctcactctatcgtccaggctggagtgcagtagcgtgatcttggctcactgtaacctccgcctcccgggttcaagcagttcttgtgcctcagcttcctgagtagctgagactacaggtgtgcaccaccatgcccagctaatttatgtatttttagtagagatggggttttgccatgttggccaggctggtcttgaactcctgacctcaagtgatctgcccacttcagttaggattacaggtgtgagcctccacgcccagctcaaatatgtattagtaaaacagaagtattagaactgtaagaacaccatgacagtgctttgacatctccattgcctcatggaatctcattctgagcttccttggttacaagtgagaatttttcacatgggtattgctgtaggtatgtatgttgagtaaatgacacaggtctcactgtgtcccccaggctgaagtgatcttcccacctcagcctcccagtagctgagaccacaggtgcacacccacacacccagctagtgagagatggggtctcactgtgttgcccaagctggtcttgaacttctgggtttaagtgatcccctgagctgtgattgtgcgactgcactccagcctgggcatcagagtaaggccctgtataaaacaaaaaataaaccgagggctgggccaggcacggtggctaacgctgtaatcccagcactttgagtggctgaggtgggcagatcacttgaggtcagcagttcgagaccagcctgtccaacatggggaaaccccgtctctactaaaaaaaattaaaaactcgactggttgcagtgactcatgcctgtaagcccagcattttgggaggctgaggtgggcggagcacgaagtcaggagatcgagaccatcctcgctaacacggtgaaaccccatctctactaaaaatacaaaaaattagctgggcatggaggctggcacctgtagtcccagctactcgggagactgaggcaggagaattgcttgaacctgggaggtggagggtgcagtgagccgaaatcgcaccactctactccggcttggcaacagagcaagactccctctcaaaaaaaaagcactaacaacaactacaacagaatcagctgggcatggtgggagatgcctgtaatcccagctacctgggaggctgaggcaggagactcgcttgaacccgggaggcagagattgcagtgagcccaggtggtgccactgcactccagcctgggcggcagagcaagactgtctcacaacaaacgaaccaaaaaacgaaggaccaatgctcaggccatccagttcggaatgcactaaattcagttttatgaaattcaaagtaactttttccttcatcccttattttgtatggattacatttatatgttataatttctgttttcagattttgtacagcagcaatttcttactctctctgcaagttttcttcccagtcacgagatactttgtgcagctgcttatctccaggccttattaaaaaggtaggttcactcttttcctatttttccattctgccatacgtttcaggtttacgcagctttcggaccggaaggccgaggtctgctgccgctttgtgcccatctcaggggcagctcctgggtcaggctggctgtcatggggcagctcctgagtcaggctggctgtcatggccacctctgctgtctgcttaggcagcctgactgctgagtgctgcctttccttgtgttctctgagtgtaaagtgaagttgtatgaagacaactacaagtctgtaattgtaatgaaatagatgttggcatttataggatagatgaattaaaagatcagtattcataataagtatctttccctggaaagaagaattcttattcctctcatctagtaaatgttccttacattgttcagacaaaggaatttttttttttttttgagatggagtcttgctctgtcgcccaggctggagtgcagtggtgcgatctcggcccactgcaacctccacctcccgggttcaggcagttctcctgccttagcttcccaagttgctgggattacaggcacgtgccaccatacccggctaattgttttgtatgttttttagtagagatagggtttcaccatgttggccaggctgttttcgaactcctgacctcaagtgatccacccgccttggcctcccaaagtgctgggattacaggcgtgagccgctggtgcccggcccagacaaaggaatttaaagatgagcattggaaaccctgaatgtcaaaagtaaaggtgaaatggcactgcaaaccagtgttgtccttttataggattttaatgaacgtctcgtgtataaaatagtggttttcaggctgggcgtggtggctcatgcctgtaatcccaacactttgggaggccgaggcgggcagatcatgaggtcaagagatcgagaccagcctggccaacatggtgaaacctggtctctactaaaaatacaaaaattagccaggcgtggtggcgcacgcctgtaatcccagctacttgggaggctgaggcaggagaatcgcttgaaccagggaggcaaaggttgcagtgagccgagactgcaccactgcactccagcctgggcaacagagcgagactccacctcaaaaaaaaaaaaaaataaataaataatggttttcaacttcaggcttcacattagaatcaactgagaagcttttgaaactatagattcctggcccctttccagataaattaagtcagaatctgggagcagcccctgaggatccagggtgcacgtatttccagttatttcctctgaggaactttgtccctggtgccaagtttttaaagaaaacatggagtttgagcttaggagagggcagcgtggttcccacccagcatgctgagcagggacgacagtccttggagcaggctggttataaacatgggaggctctcatctcctcgggggcagagatggacacggtcacgcagcaccaatagtgtgtctggcttgtccagttggtgtgcatttttggtgggaacgccattcctggcagaggcctagagatgggctgtttcactgcccgggaccaaaccagccctacccctgggaggcagttttgttcctgcaattctgcttccagacatttagctcaaggaagcagtcagatggcaggaaggtctgcacataggctcttccctggagcactgtgcacagccatgatcgctgaggggctctgcacccttccaggggctggactgaggtcccctgaacgtggggttgtgtgttgtgccctcccaggggctggactgaggtcccctgaacgtggggttgtgtgttgtgccctcccaagggctggactgaggtcccctaaacgtggggttgtgtgttgtgccctcccaggggctggactgaggtcccctgaacgtggggtcgtgtattgcgccctcccaggggctggactgaggtcctctgaatgtggggttgtgtgtgtgggctgttgatggtctgtttccacctgagcatttgctcagccactcacagtgaaacttgcgcaatgaagaaacggccgggtcactctctgtttcagtttcagttcctcatgttcagattgttctcagaggcccgacagcctctttctgaggaggacgtagccagcctttcctggagacccttgcaccttccttctgcagactggcagagagctgccctctctctctggacacacagaaccttccgagaggtgttgaaagaggaagatgttcacgtaggtgaccgttccttctcctgcatcatgccacgtcctgagtctagggtttgtgtgtgctcctcgggcaagaacagcagcacgtaggtgaccgttccttcccctgcatcatgccacgtcccgagtctagggtgtgtgtgtgccgactgtctcctcgtctcgagtctagggtgcgtgtgccgactgtctcctcagaggcaagaacagcagcacttagatggtttgattggaatcttgactaaaatcgttgtggcctcatgtgcagctcttaagaaattatacagatactgggcacggtgctcacacctgtgatcccagcactgtgggaggccaaggcgggttgatcacctgaactcaggagttcaagaccagcccgggcaacatagtgaaaccccatctctacaaagaatgcaaaaattagctgggcacagttgtgtgcacctttggttccagctacttgggaggctgaggcaagagaaatcacttgagcccaggaggtggaggttgcagtgagccaagatcacgccactctattccagccaggatgacacagcaagaccctgtctcaaaaaaatatattaataaatacagagaaaccctgctatactttctcagtttctcccaacacgaacttctttttttatttttactgatatattttttgagacaacgtctcgctgtgctcagtggtgcagtcttggctcactgcagcctctgcctcctgggttcaagcaattctcatgcctcagcctctccagtagctgggactacaggcgcctgccaccacgcccgactaattttggtatctttagtacagacggggtttcaccatgttgtccaggctggtcttaaactcctggcctcaaattacccacacgccttggcctcccaaaatgctggaattacaggcgtgagccattgcgcccgagaacttgttttttgttgttgttgttgttttgttttttttttctggtggagtcttactctggggcacagtggcgcaatcttggctcactgcagcctctgcctctctggttcaagtgattctcctgcctcagcctcccaagtagctgggactacaggcgcgcaccaccacgcctggctaagttttgtatttttagtagagatggggtttcaccatgttaggctggtctcgacctcctgacctcgtgatctgcccgccttggcctcccaaagtgctgggattacaggtgtgagccactgcgctcggcccctgggaacttgttttaaacatgtctgccaggctgtgtggtggtcactcagggtctctgggctcacccatgtgtgcctggttactggagctggcattgctctcaccagtgtgccttggtactgatttatttctgaggatgtttgcctggttgttttggtctttagaaaagaatttcaaggtggctgggcacagtggctcatgcctataatcccagcactttgggaggctgagatgtcaggagattgagaccatcctgggtaacacgatgaagccccatctctactaaaaataggaaaaagtgatccttctgctttggcctgccaatatgttgagattgcaagtgtgagccactgtgccaagccttttgtgaaattattttattatttttaaattattatttttttttttggagatggaatcttcctctgttgcccaggctggagtgcagtggcacaatcttgggtcactgcaacctcagccttctgggttcaagggattctcctgactcggcctcccaagtagctgggaccacaggtgcacgccaccgcgcccagctaactttttgtatttttagtagagatggggtttcactgtgttagccaggatggtctcaatctcctgacctcatcatcctcccgcctcggcctcccaaagtgctgggattacaggtgtgagccaccacgcccaaccctttttttttttttttttcgtatttttagtagaaacagggtttcaccgtgttagctaggatggtctcaatctgctgacctcgtgatctgcctgcctcggcctcccaaagtgctgggattacaggcatgagccaccgtgctcggcctcctaaaaatgtttttaaaaaacttagctggtcatggtgatgtgcacctgcagtcccagccatctgagaggctgagggggagaattctggagttcaggaggcagagtctgcagcgagctacgattgcaccactgcacacactccagcctgggcaacagaacctgtttccaaaaataaatgaaggtatgctactgtgaatagctgtagaatgttgttgttttgttagtttcttttttcttttttttttttttcctttttatagatagttctcactctgttactcactgcagccttgacctcctgggctcaagagatcctcctgcctcagcctcccaagaggctgggaccacacacatgtgccaccacacctggctgatttttaaatcttttgtagagacggggtgtcaccatgttgcctaggctggtgtcaaactcctaggctcaagcaatctgctggcctcagcctcccaaagtgctgggattacaggcatgagccaccgtgcccaggtaatttttaaatgagatgaggtcttactatgttgcccagactaaaatagccgttttatacttagaaagaaggattacagtactaacatctttgtgctagggaaatcctgtaagaaatcattcttgataaaactaaggtttctttcctgtggaactctcagctgcaatttcattataacacagggacatggaggactgcgtatgagatgaaatgacaaactggtttataaacctgtcggtggattgtgtgttctgtcctcattgtattgaattgcttgctctctttctcagttaacttaccaagactggttacacctggagctggaaattcaacctgaagctgatgctctttcagatactgaacggtaagtgttgaaaagagctaccctggccaggcatgatggctcacacctataatcccagcactttgggaggctgaggcaggagatctcttgaatccaggagtttgaggtcagcctgggcaacatggggaaactccatttctacaaaaaatagaaaagaaattagccggacatgcggcacgttccagtcatcacagccacttgggaagctgagcaggagcattgcttgagcctgggaggtagaggctgcagcgagctgagatcacaccactgcactttagcctgtgcaacggagtgagaccctatctcaaaagaaaaaggagcttccctttaaaatgttacacggttttccacattgccttaaagcctatgtttcgtcattttatcctcaatttaatgtttggtttacctgttaatctttgagcacaatttcaattttttttttttcggtggcaagatttattaaagcaaaagcgaaagtaaagcttccacgcggtggcaatttctgtttttctttttttttttttttttctgagacagagtcttgctctgtcacccaggctggaatgcagtggcgcgatctcggctcactgcaacctccacctcccgggttcacgccattctcctggctcagcctcccgagtagctgggactacaggcgcccgccaccatacccagctaattttttgtatttttggtagagacggggtttcaccgtgttaaccagggtggtctcaatctcctgacctcgtgatccacttgccttggcctcccaaagtgctggcattacaggcgtgagccaccgcgcctggccaggttgcccaatttcggttgttattcctttatttaagaaacatttactgagctcctaccatgtggcagacaattctagagtgttctagaagcagggagtatagaggggaataaacaagcctgcccatatggcacctttgtatcaatgagggcagatgtggcacgtataaggcacccacttagacttcaccctaccctggctgggctatggctgctgtccgggagctgtacacctgtgtccaggccctggcaacacacaggtagatacagaagtggattaaaggtaggaatgagccctggagataacagacagggccgtgtgagaggaaatgaccaggcaggagcagaggctggtgtggagcaggtggtgcagactttgaggagtgatgccagccttgacttgggggcaccaagaagtgggtaaatgaagcagtgaacccccatgagtcccagggctgatgactgagaccatttgagactatttgagaggccagatgtgctgttctgggcataggagtagggagcccagaggaccgttgggtttaagggtgtggagtttagggtggaggtcagggagaggggaatgtggtcactgcagatatggagtatcctggtgggtatatgggcctcagggtgcctgccacacctagactcaggagagggttggcaacagccaccctgtgctcctcgtccttccggccatcaggggccttccaggcacatgcagcactgtcgcctgcacctggatcctggtatcagattctggatgaaaccaatggaagtaataggaaaaggaaaacataggggccacaaaaagaaaactcgctgctgcctgcggcaaaacacgtgctgatggttcaggtcgtgccaagcccgctctgcaggcgcttccttcactcacccccgtttctcctcccggctgctctctggggtggagtctaaggaggaggtcagagggaggggcttgtctgctgcatgaggtcatgctgcatcaggtcaccgctgcgtggaagttgtgttgagatgtgttgcgggattttctttcttttctgaattacttaagtgatacttagatacattctgtgccagttccagacagtgtgggtggagcaccccagttccggacagcgtgggtggagcaccccggtcccggacagcgtgggtggagcaccccggtcccgcacagcgtgggtggagcacccaggtcccgcacagcgtgggtggagcaccccagtcccggacagtgtgaggagagcacacactccctagcactcacatttgcagggtcgtgtggagcgttttcctggttgtggctctttctgcataaatggattgcggtattgatggttctgtgcactgcggatttgtttgtttgtttgagacagggtctcactctgttggccaggatggagtacagtgatgcactcacggctcacggcagcttccctctccagagctcgagtgatcctcctgcctcagcctcctgagtagctgggaccacaggtgggcactactatgcccagctaatttttttattttttgtaggaatggggtctccctttgttgctcaggctgatgtcagactcctgggctcaagtgatcctcccaccttggcctcccacagtgctgggattacaggtgtagccactgcagttttgagtcagtgtctccttgagccccttcccatccgtatccacagagtccacagtctggatgcaggttgcttcaccatccccttctggtgggcctgtgagtagctcaggtgccctcaggtgactttccaggctactttttttttttttttttttttttttttttttagacggagtctcgctctgttgcccaagcaggagtgcagtggcatgatctcagctcactgcaagctccacctcccaggttcataccattctcctgcctcagcctcctgagtagctgggactacaggcgcccaccaccacgcccggctaattttttgtattttgagtagagacgaggtttcaccgtgttacccaggatggtctcgatctcctaacctcgtgatccgcccgcctgagcctcccaaagtgctgggattacaggcatgagccactgcacctgccccagcctacatttttgtgcttgcctattctgttcaccaagctcatgtgctgtgtggccagcagttaccccgtgggatgtcatcctgagtggcctttgatccgtggaaggtggggtcacaaaggtcactcctgagaccaggcctttcccacatccccaggcatcccaccctgcagacagtgaggtctcatccctactccaaggtcccgagccgccagtctcaacccagctctcactagtgctgtgtgtcccttactatgggcctattccctggttatggggaaccgctggccacgaagcatttctcagaattgatagcagtgtttgctgttctaggcaggacttccaccagtgggcgatccatgagcactttctccctgagtcctcggcttcagggggctgtgacggagacctgcaggctgcgtgtaccattcttgtcaacgcactgatggatttccaccaaaggttagcagcacacactgtattagggttctctggagggacaggactaataggatatatataaaggggagtttctggccatgctggtgcccatctaattagcttagggtgggtctgcctttcccagcctatacccaaatgtcagtctcctttggcaacaccctcacagacacactcaggatcaatgctttgcatccttcagtccagtcacgttgacactcagtattaaccatcacacaccgatgaggccttacttttaatcatggtagttctaagaatgcatttttctctcagtccaattttggtatgcaaagtacacttgagcctatcacatagcaaatctatgtcaatacaaaataaagccaagcttcctgcatcggttgtttctttatgtgtatagacttgtcagaagcgacaacttcgggctgggcgtggtggctcacacctgtaatcccagcacttcgggaggctgaggtgggtggattacctcaggtcaggagttagagaccagcctggcctacatggtgaaacctccctctctactaaaaatacaaaaattagctgagtgtggtggcgggtgcctgtaatcccagctacttgggaggctgaggcaggaggattgcttgaacctgggaggcagaggttgcagtgagccgactgggcgacagagcaagactctgtctcaaaaaaaagataaaaatagcaacaacgttgtttttctgttctgtcacctggtattcaaggtgagcatgtgtgaagcacggcacaaatggcctagtagatcctgggcatcacagcctctctccatctgagagggattctcaggacagagcagttcctgaggtgttgcatgtgggccagaaggatggacggagtgtacctggggctgtccaggctttgtccccaggggctcttgtttgcagcttcacactgttgtgttacagctgcagcattcagtacagatggcaagtgtgtatgcagcttccccccatgtctcctgcctgcggcaaccacgaatccattttatgttcatggatttgcctgtttgggatgtttaatatcaacagaatcatgtagtatgtggccctttgtgtctggcttctttggctgagcagaatgtttctgaggctcatctgtgttgtagcacatatcagcatacccttccttcttatggctgactgatgctcacagaaggtatggaggctgacgcacctccatcgtgggtgacttcttgttaaccctactccaagaatgcctcctgagatttcccatttatctgctgttaccttaaatcccactcttaggtcaaaacaaccttgaggctgggcgcagtggctcatgcctggaatctcagcactgggaggccaaggcaggcggatcatctgagctcaggagctcgagaccagcctggtgaaaccgtctagacaaaaaaaaaaattagccaggcatggtagtgtgtgcctatggtcccagctactcgtgaggctgaggtgggattgcatgagccggggaggcagaggttgcaatgagctgtgaaaacaccactacattccagcctgtgtgacagagtgagactccatctcaaaacaaaaaagcaaatcttccaccataaatccagcggttagattcacagagcattcttgcctttccctgaggggttgacttcaatagtccttccctgtggtatagaagccctgcctgggggtaacagtgcagggatgcatcgtctctctaggctgcctgagacatggtttctgtctgtaagtccttaaacgtttctgtctgagaaactggattattcagcctctcttcagccttccagcttccccagcctttatgggtaggtttgcacagagctgctcactgcggaacagaaagatcagccatattttgtttatccattcactttgtttgtttgttttttgagatagtcttactttgtcttatttatatttattttgaaactgggtctttctttgtcacccaggctggggtacagtgactgcagcccactgcagcctcgacctcctgggctcaagtgatcctcctgcttcagcccctcaagtagctgggaccacaggcaccaccatacctggcaaatttttgtagttgtagtagagatggggtttcaccatgttggccagactggtcttgaacttctgacctcaggtgatctgcccgcctcggcctcccaaagtgctgggattacaggcgtgaacctctgccaggcctgacttgatggtagccatcctagtgggtattaagtgctatttgatagtggtttcgatttgcacttccctaatgggtagtgattttgaacatctttccattttcttattggccattttagattttttttggagaaatctgttcacatccttagcccatttgaaaactgggtcacattcatgtactgcataagaatgttctggttaacaacgagccacatatatgacagtaatcccacatagccataattttttgtaccttttttttaaactgtgtttttaccgtaccttttctatgtttagatacacaaatactgttgtgttacagttgcggcatgcaatacagttacatgctatgccggtttatagcctgggagcggtgggccgtgccatgtggcctaggtgtgcgggggctctggtctgtttctgcgcggtgggccgtgccgtgtggcctaggtgtgcgggcggctccggtctgtgtctgtgcggtgggccgtgccgtgtggcctaggtgtgcggggggctctggtctgtgtctgtgctcttggatgttcacgtgatgaaaccacctaaagatgtgtttctcagaatggatccttgtcattgagcagttcatgactgtatttgtcttactgagttgtatgagttctttatatattttagataaagttcttatcaaatatatgatttgtaaatattttttcccattctgttaattcttttttcactctcttgatagtatcgtttaatgcacaaaggttttaaatttttataaagtccagatcatttatttttagtttagctctttaggattttgattcattttgatggatcagaaaacattttgggccagccacggtggctcacgcctgtaatcccagcactttgggaggctgaggcgggcagatcacttgatgtcaggagttcgagaccagcctggccaacatggcgaaactaaaaaaatacaaaaactagccaggcatggtggcaggcgcctgtaatcccagctactcgggaggctgaggcggcaggagacttgcttgaacctgggaggcggaggttgcaatgagcccagattgtgccactgcactccagcctgggcgacagagtgagagactgtctcaaaaaaaaaaaaaaaattgttgtgtgaggtcatccagctttattctgttgcttgtggccatgcagttgtcccagcaccatttgttgaaaacacttctttccccactgaatggtcttggcacccttgtcaaaagttagatggctgctcgtgtgagggtttgtttctggctctcattgtgttcccttggtctgtatgtccatatgcactgcgtcattgggatgaagctttgtagtaggttttaaaattgggaagtgtgaggcctccaacttggttcttctttttcaggatggtttggcttttctaggtgctttgtagttgtgtcttaattttgggatgagcttgtcagtttcgacaaaagtagctgggaccctgatacggactgcatgtggggcagtattgccatctcagtgatagcgagtcttctttccttttgaatcatttgttgctaacgtatagaaacaccagtgattcttgtatattcattggctctagtcatttattagttctaagagtgtttttgtatcgattccttagggctttgtatatataagatcgtgtctggccaggcatggtggctcatgcctgtaatcccagcactttgggagggtgaagtgggcggatcatgaggtcaggagttggagaccagcctggccaacatggtgaaaccccatctctactaaaaatacaaaaattagccgggcatcgtggtgggctcctgtaatccgttacttgggaggctgaggcagaagaatcacttgaactcaggaggcagaggttgcagtgagttgagatcatgccactgcaactccagcctgggcgacaagagtgaaactcagtctcaaaacaaaaaaacaaaagaaagatcatataatatgtgaagagagatagtttcactttttcctttcctatctggatgctttttctttttcttgttgaattgccccggcttgaactccccgggcagtgttgttttttttgttgttgttttgttttgtttttttttttctgagacggagtctcgctctgtcacccaggctggagtgcagtggtgcaatctcggcttaccgaaaccttcgcctctcaggttcaagcgattctcctgcctcagcctcccgagtagctgggattacaggcacccgccaccatgcccagctaatttttgtttgtttgtttttgagacagagtgtcgctgtgtgtcccaggctggagtacagtggcactatctcagctgtctgcaacctccgccttccaggttcaggcaattctgctgcctcagcctcccaataggtgggattactggcgtccgctaacacgcccgtctaatttttgtatttttagtagagatagggtttcgccacattggccaggatggtctcgatctcctgacctcagatgatctgcctgcctcggcctcccaaagtgctgggattacaggcgtgagccaccgtgtctgtccccagtgcagtgttgagtagaggcagcgacactgttctgagtgtagagaggacatccttgttgcccctgatcttaggagaacagctttcagtctttcctcattaaatctgacgtttgctgtgggttttcatccatgccaggcactagattgagaagatttcctttgttcctggttgattgagtgtttttatcacaaaaggatgtcacatttcgtcaagtgctttttctacatctattgagataatcttacggtttttgctttttattttattgataactgcgttatattggtttggggatcttaagctatccttgtgtagggaccagccccggagggtcggtgggtctctccctgtgtgcggcgatgagagagtgtagaaataaagacacaagacagagataagagaaaaggcagctgggcccgggggaccactaccaccaatgcgcggagaccggtagtggccccgagtgtcgggctgcgctgttacttattggatacaaggcagaaggggcagggtaaacaatgtgagtcacctccaatgataggtaaggtcacgtgggtcacatgtccactggacagggggcccgtccctgcctggcagctgaggcagagagggagaggagacagagagaaagacagcttacgccattatttctgcatatcagggactattagtattttcactaatttgctactgctatctggaaggcagagccaggtgtacaggatggaacatgaaggtggactaggagcatgaccactgaagcacagcatcacagggagacggtgaggcctccggataactgcgggcgagtctgactgatgtcaggccctccacaagaggtggaggagcagagtcttctctaaactccccgggggaaagggagactccctttcccggtctgctaagtagtgggtgttgttccttgacaccttttgctaccgctggaccacgatccgcttggtgacgggcgtcttcccagacgctggcatcaccgctagaccaaggagccctctggtggccctgtccgggcacaacagaaggctcgcactcttgtcttctggtcacacctcagtatatcccctcagctcctatctctgtatggcctggtttttcctaggctatgattattgagtgaggattatcataatattggaataaaaagtaattgctaccaactaatgattaatgatattcatatgtaatcatatctaagatctatatctggtataactattcttgttttatattttattatactggaacagctcgtgtcctctgtctcttgccttggtgcctgggtggcttgccacccacatccttgcattcttgggataagcctccttggtcatggtacataatttttgtatttcctaggttggggttggtagtattttgtggcagtttttgttgtttattgttgactaatgtgagggtcacactgtcagagaagcacagccatcactcagctccggaggcaggaggagaactgggaacttcagcactattaggcgatactgaggaggattttattgtattttcatttcagctcaaggagttatgaccactcagaaaattctgatttggtctttggtggccgcacaggaaatgaggatattatttccagattgcaggtgagtttgagggtgccacaactcagtgcattcacttcatttaagccgcgtgctattaagatatttattgccaggcgcggtggctcacgcctgtaatcccagaactttgggaggccgaggcaggcggatcacacagtcaggagatcgagaccatgctggctaacacgatgagaccccgtctctactaaaaatacaaaaatttagccgggcgtggtggcgggcacctgtagccccacctactcgggaggctgaggcaggagaatggcatgaacccaggaggcggagcttgcagtgagccgagattgtgccactgcactccagcctgggcgggcgacagagtgagactccgtctcaaaaaaaaaaaaaagatatttattgttggctcaggcttgtaatcccagtactttgggagtccgaggctggtggatcacctgaagtctatacaggtaggcagcatgtacctgtgtgggttcactgtcagtcaacaggcatttactggtgctggccacccgtgcgtcttctgtgccaggcccctgtctctccctccgccagctctggggcctcccaactccttagccagatgctttccctagacccacctggctccttctcagtgagaccatctgctttttcctcttaattgtaatcataattattattattattgggacagggtcttgctctgtcacccaggctagagtacagtggtgcgatcatatctctctgcagccttgacttcctgggctcaagcaatcctgacagcgtgcacctgtgtgcgccaccacacccagctgattttttgtagagacggagttttgccatgttgcccaggcttgtctcgaactcctgggcccaagtgaaccacccatctcggtctccaaaattgttggattacaggcgtgagccactgcacctgatctttattcttctttaaaaaatacagccggccaggcacggtggcttatgcctgtaatcccagcactttgggaggctgaggtggctagatcacttgaggtcaggggctcaagaccagtttggccaacatggtgaaaccccatctctactaaaaatacaaaacactagtcaagcatggtggtgtgtacctatagtcccagctactcaggaagctgacttaggagaatcagctgagctcgagagtcaaggctgccataagccaagactgcactgccgcactccagcctgggcaaccggactgagactgtcctaacaacaacaacaacaacaaaagacttgtgaggcaaaaatgatgtgtggggtaaaatgttagccagaggttaatctgggtgaagggcacatgagtgtcctcctgctgtttttttttgttgttgttttgttttgttttgtctgtttgtttttgagacagagtcttgctctggagtgcagtggcgggatcttggctcactgcagcctctacctcccgggttcaaactattctcctgcctctgcctcctgattagctgggattacaggcgcctgccaccacacccagctaatttttgtatggctaattttgttggccaggctggtcttggactcctgacctcaggtaatccatctgtcttggcctcccaaagttctgggattacaggcgtgagccaccatacctggctgtttttttttgtttgtttttttttgagacggagtctcactctgttgcccagtctgaagtgcagtggtgcgatctgggctcactgcaagctccacctcccgggttcacgccattctcctgcctcagccgcctgagtcgctgggactacaggcacccgccaccatgcccagctaatttttttgtattttttagtagcgacagggtttcaccatgttagccaggatggtctccatctcctgacctcgtgatcctcctgccttggcctcccaaagtgctgggattacaggcatgagccaccacgcccagctgttttttcttaattgataagtagttgataagtagtactgtaactcctgggctcaaggaatctgcctgcctcggcctcccaaagtgctggcattacagacgtgagccacagcacccggcctgcactgttctatatttgcaatttcaaagtgatttccaattgaaatagcttgccccacttgttccttcttgccctgtccactgtggagacctctccctgacccctgacgtctgggtccccgactggctgggcagtgagccccgaggccttcctgtgccagcatactgctctttttcaggagatggtagctgacctggagctgcagcaagacctcatagtgcctctcggccacaccccttcccaggagcacttcctctttgagattttccgcagacggctccaggctctgacaagcgggtggagcgtggctgccagccttcagagacagagggagctgctaatgtacaaacggtaacacctactaccacctgggcagggcagcaccacctgggcagggcagcatctcatgacggtcctagaggttctttgtagtgagtttgtttcccgttacttacttgtctgtgtgtccccaccccaagcctgtccatttctgtggcacatgccacggagaagaggatctggagggttgaaagtacttttgattaaaaccttccagccaagcgaggtggttcatgcctgtaatcctagcattttgggaggctgaggtgagtggatcacctgaggtcaggagtttgagaccagcctgaccaacatggcgaaacgccatgtctactaaaaatacaaaaaaaatacaaaaaaatttagctaggtgtggtggcgggcacctgtaatcccagctactcgggagactgaggcaggagagtggtgtgaacctgggaggcagaggtttcagtgagccgagatcacgccattgcacaccagcctgggcaacagagcgagactctgtctcaacaacaacaacaaaaccttcctgctcagacgtggagggacgtcgcagaaggagctcttgtgaaagtagggaaaagtgttcagaaatgcccacggcggctgcatttataagaagcagcgtggagtcatttaattttacagtcatagggaattgcttcactagacagactggtgcgtcatccacttggttatcgtgtaactgtcagaagttgttggttattatgtaactgttaaaagttgtttgtttggtaacacattttgaatgcagtgggccaaacacagtataggggaggtgggctcagagtgcaggctttggatgggacagagggacacaggccaaggctctggttccaacagtggccctgggtttcagggtggtggttgctgctctgagagtctgagcccttgggaaggagcagagtgtacgctgtgctgtcgccaccaatacagccccttctttccaggatcctcctccgcctgccttcgtctgtcctctgcggcagcagcttccaggcagaacagcccatcactgccagatgcgagcagttcttccacttggtcaactctgagatggtaggtgccccgtgtgcacgtgtccgtccgatctgtcagtgcctgtggcgctaacagcagctcttgcagcctccatgcgtgtactgaccgtgtgaattactgaggaaagggttcaaagtcaaatagggaacagtgtctggaatgccatgtgagggaggaccccacccacagccaggacggcgaccagcacatcaccaaaccagctgtaggttgccttctcccaagtttgagttcctttagtttccctcaagttttaatgattttgacacatggaatcgtacagaccattttgtgtgccacgcacctcggttcatttatttctaatctcaacatgcttcatgtgtaaaaaaagccttgtggtgatctgactaccgctgttgcctgccaggcagcccagttatcttccattttagacactgcccagcgtgagttgcagggtgatcttaaccagcaggctgggtgcggtggctcacgcccgtaatcccagcactctggaaaggtgggggatcacttgagcccaggagttcgagaccagcctgggcaacatgacaaaaccctgtttctacaaaaaatagaaaaattagctgggtatggtggtgcacgcctgtactcccacctacttgagaggctgggtcaggaggagtaattgagcccaggaggcagagttgcactgagccaagatcccaccactacactccagcctgggtgacagagcgaaactcttgtctcaaataaaaagaagtgacactcgctgtggggacgggcagcgtagggacccagttggtcagagctggggagacggataccagcccctcccactctacagagagcagcttctgctcccgaaggcctttttcttgtttttgaagatgcacaaatgtgagagatggaattcaggttccatgccagctgtgcagcattttatatttttatttatttatttatttatttattttttgagacagagtcttgctctgtcgcccaggctggagtgcagcagtgaaatcttggctcaccctgcaacctccgcctcccaggttcaagcgattctcctgcctcagcctcctgagtagctgggactacaggtgcctgccgccatgaccggctaagttttgtatttttagtagagatgacgttttaccatgttggtcagtctggtcttgaactcctgacctcgtgatccacccgccttggcctcccaaagtgctgggattacaggtgtgagcccggccttgtgcagcacttcaaaatgtgacaaggaaagcagaggacgtgagactagcaaaagctttcagaaaatcactatggtctcctttgaattcttatgaatggctgtttttcagaaagctctcagttggcacgtgacagccgacagacaggaaaacaccatagacagcacttggttagtgaagggaccagaggatggttggcccttggtattagtgtcgtcctcaccacagttctacgctccgggtgcgtccccttccctgcggctgcttgtgcctccctggcttcttcctggagcctacaagactgtttgggccagagctggtgggctgcaggatctggccgcccagggaagccgttaagtttcaggacagcacagccagggcgccaggcccggtcagcccaggagcaccatccatggtggccacgccaagccttagcgagtgtttttctcaaaactgaatccacagcagccactctgcatgttggtctcgcctctcttcctgtgggcttttcttacctgccttgaactcttttgcagagaaacttctgctcccacggaggtgccctgacacaggacatcactgcccacttcttcagggtgagatgctccctcagcccctctcgtggccttctcagaacgccgtgggtggatcctcctgtcagcttcctgtgagttccttcactctactagttgtgggtcctcacaaaccgctgacctcctgctgcgttctctcctgcagggcctcctgaacgcctgtctgcggagcagagacccctccctgatggtcgacttcatactggccaagtgccagacgaaatgccccttaattttgacctctgctctggtgggtcagctgtcttgtttggtgttttgttttggggatgagtgggagactccacagctgcctctggcatctctgcagcacgtctccatcacgggtgttaccatctcagggaaaatgcatcaggagacatggaagccacagttaaagatgccagctcatagcagatgagggccgcacatcctgagttcccagaaccgtccctgcccccaccgccgtcaccatggcacccgcaggacttctcccctgtggaccccactcagaccccacgggcaccttcatgtccacaggggtgcagggcttgtttgttcacggtcttgggttgtgcactggctggaggctgtacggtggctgcctgtgccccgtcacgagagcatgactgtggcccacttgcgcctgactatgctttcttgggacttcggagcagagacttcacctcagctcccgccagagctcagcaggctcccctagcagcccagggtcccgagagtgggaggagggcagcatttccctcacttccctggcggctcacttagtcctgaagaccacagctgtcgcccttccttctcggtcatcagggacaggagggcctttttctccgcagcacggcatgttccccagggagctccccaagcaggctgcatttgcaccgagttgtagctcagttggtggaattcgtgagaaatgaactcttcggtgtttagaacgccacctctcagctgagggcatccaaggaccaggcattcccagctcagggcagtgtggtctcttcactgtttcgttcccagctcagaggagtgtggtcccttcactgtttcgttcccagctcagggcagtgtggtcccttcactgttttgttcccagctcagaggagtgtggtcccttcactgttttgttcccagctcagggcagtgtggtcccttcactgttttgttcccagctcagaggagtgtggtcccttcactgtttcgttcccagctcagggcagtgtggtcccttcactgttttgttcccagctcagaggagtgtggtcccttcactgtttcgttcccagctcagggcagtgtggtcccttcactgtttcgttcccagctcagaggagtgtggtcccttcactgttttgttcccagctcagaggagtgtggtcccttcactgttttgttcccagctcagaggagtgtggtcccttcactgtttcattcccagctcaggggactgtggtcccttcactgtttcgttcccagctcaggggagtgtggtcccttcactgttgcgttaggccaggctcttccttctccaaattccacgtcttccatgagtgtgggtaataaatgcctcatggaactgctttgagccttaattgacgtaaaaaatactggctttggagttccagagcgcagggcgagtgtgggcctgtagtggcctgtaggagcactgggggcttgtcatggctggggcagcggaggtgtgtccatctcagccaccctcatctgtgtgctggtgctctctccataggtgtggtggccgagcctggagcctgtgctgctctgccggtggaggagacactgccagagcccgctgccccgggaactgcagaagctacaagaaggccggcagtttgccagcgagtacgtgtgggtggtgagatggggtgtgcccgcccagatgcacttcgggacctgctcaaggtcatctcctaaacaccctggcttgcttgagagaagcggtgtgggcagcctctcgtgtgagcagggagaaaagaaccgagttctcgtggtggtgggcgcctgtaatcccaactactggggaggccgaggcaggagaatcagttgaacccaggaggtggagtttccagtgagccgagatcactccaacggccaatagagcaagactctgtccagaaaaaaaacaaaaaaaaaaacagcctctgccagtgtctcgtctgagtgaggaacggcctctcccaggctcccgtctgagtgaggagctcgagtgattcctttgcacctgctccccttcctcttaaatctaatgtgggctcctagagtgcaccgcgtgctggtagggtcagtgtcatggggacctcagggatgcagattctcagcctaccctgacctgtcgaccccagtcagatattcacgggtccttgcaaaccatcaagctcctggcgcaatccaggctcacacacccttctgaggaccacagagctgacagccactccacctgctgaatgtgggtgccgtgttcttaaggggtcgtcagagggcactgctagtacccatcctgcctccttggagaacaccttactttgtgactagttttgaatcactgatgccacaccgggtcccctcagggtttggctgctcgccgtctgctgaaagaagagaagagggccccggcgcggtggcgcacacctgtaatcccagcactttgggaggccaaggcaggtggatcacctgaggtcaggagtttgagaccagcctggccaacatgtgaaacaatctctactgaaaatacagaaatgagctgggtgtgatagtgtgcgcctgtagtcccagctactcaggaggctgaggcaggagaattgcttgaacccaggaggtggaggttgcagtgagccgagatcatgccattgtagtccagcatgggcaatgagagagaaactccatctcaaaaaaggagaaagcaggtcacacctccagttctaattctacaaacacagatcagattgtctgaagttttgttttttgttttgttttgtttgagacagagtttcactcttgtcacccaccctagagtgagatggcacgatctcggctcaccatgacctccgcctcccaggttcaagcgatcctcctgcctcagtctcctgagtagctgggattacaggcgtgagccaccatgcctggctaattttgtatttttagtagagacagggtttctccacgttggtcaggctggtctcgaactcccgacctcaggtgatctgcctgcctcagcctcccaaagtgctgggattacaggcgtgaaccaccacgccctgcctcgtttttgtttatttgagattgagtctcactgtgttgcccaggcagatctcaaactgctgggcttaagcgatcctcctgaagtgctatgattgcagatgtgaaccgtcatgcccagcttatttaaagtctcttaaaccacagcattgtttcattaatttcctaccaattttttaaccagccagaaaactcagacaccacactggggccagagccaggcagtcctttgttctctgttgtaggagggaatgcctgatccacagggccaggcatgggcaactgaggaaaatgaggcctcttcttccaaaatgtaggcagctggggcccaagagcacagggcaaggtagacaggaccaggccagctgcctgctcagtcagcagctctcagaacgccaggatgctgtgggggcagcaccagcacctgcccacactctcacgtggacctgggggatgcagacctagtttctgatggtcctgaaacccttctctgtcctctgatggaaaggcaggccccaaaggtgacaggtgggaataaggacttggtttctatggcgtggttgtatggttgtaaggccctgcaatgaccccgttctctctgtcccagtttcctctcccctgaggctgcctccccagcacccaacccggactggctctcagctgctgcactgcactttgcgattcaacaagtcagggaagaaaacatcaggaagcagctaaagaagctggactgcgagagagaggaggcaagataggaaattcttttactgatttattttctcgcaagcttggtttcaatcagtgctatttctctgggcttgtctgatgaactgtttttctaaagacaaatatgtggcttggagcaagactttttttttttttttttttttttgtatttttagtagagacggggtttcactgtgttagccaggatggtctcgatctcctgaccccgtgatcctcccgccttggcctcccaaagtgctgggattacaggcgtgagccaccacgcccagctggcttggagtaagactttgactatcaagtttactagtaaaaataataatttcagttttttaaatggttgtatgtagttgagacagggtctcactgtcgcccaggctggagtgcagtggtgcagtcagctcactgcagcctcttctgggctcaagccatcctcttacctcagcctctggagtagctcagactacaggtgtgtgccaccatgcccggctaattttgtaattttttctgagatgggggtctgtagtccaggcatggtggctcatgcctgtaatcccaacacttagggaggccgaggcaggcggatcacttggtgtcaggagtttgagaccagcttgggcaacatggtgaaaccctgtctctactaaaaacacaaaaattagtcgggtgtggtggtgcgcacctacaatcccatagcctgtaaagctactcaggaggctgaggcaggaggatcacttgaacccagggggcagaggctgcagtgagccaagatcacgccactgccctgcagtctgggtgacagagcgagacttgtctcaaaaaaaaaaaatttgtttaaagtaaaaattaaaagagatgggggtctcactgtgttgcccaggcttgaagtgcgtttcttcagcttatttttatcctcatcacagcccagcgtaaatgctgtcagccttcaagtggtgccttctgtgttcatgctgcagtagccttgattcatgtgctgagggacagccccagataagcttgcagtgagacagctcagacctggggtgctggggacaagaggcagcaaggatgggaccgtctgcagccataggcatagggaaaggagtgggagaggctgctcttgaattccaggccagggaccatgttcgactcagacccactgcccacctggttgctgcaccctggaaagcctgactgcccccacaagaccagtgacacccacacagctctctgtgcagggagccaagggtggtgtgtgcagaacaggaacagaaacaagcatcccacaagagagctggaggcagcagccctctgtgcccagcccgagatccgcaacgcataggtgccatgtcagcacacaacttacaccagctcaaagctggatcgacagcagcgcccagggttttggtgattataaccaccctgcaggggttcttctgagtacgtcttcaggtttcttgtgtagttttgttagaagggattttagtggctccagggccttaggaccctagtgtgcagcgaggagtgtccacagagaccctgcccagtcaggccctactttaggctggagcctgtgggcttatcttcaaggattttacaaacacttctgacaggaggccttgcagggagatgatgctgagttgggactgcgcacagccaaggagaccgcagcagtcttctctttctggctcttgtcactttttcaaactgtttctagctttgtttaaaggcaagtgtgaaatgacccagccagtagtaattaattctcaattaagctgtctctctagaagtgattggaaagttttctaagatccacttaaaggatttatggcctagatgtaaaaaatttcaattaaagaggaatgtgtcagccttatttagaatgacagcacaggtaattttaatgtaataataagtgcacgtttttatttacagctattggttttccttttcttcttctccttgatgggcctgctgtcgtcacatctgacctcaaatgtaagtcagaccttaccagccaaggtgtcctctcccactgtgggccaggcaggggcaccaggcagccagcttccaagtcagggtttccagactagctcaggagctccttgtgtttgcggaagtgtgagtgagaactcccaggccgtgggttttttttttttttttttgagatgggggtctcactctgtcacccaggctggagtgcagtggtgtgatctcagctcactgcaacctcagcctcctgggttcaagcaattctcctgcatcagcctcccgagtagctgggattacaggcgtgagtctgtcacacccggctaatttttgtatttttagtagagacggggtttcaccatattgccaggctggtcttgaactggcctcagtgatccgccgacctcggcctcccaaagtgttgggattacaggcatgagccactgcatccggcctgtgggcctttcttttaatgtcttatttgaggacgtggtgcagcagccttggtgtgggtgctcgaagtccctggcctcctacctgagcctcttctgtccagaggcccagtattaccttctataggtaaaactgtcaccagttttaagacttacaataagcaaagaggaaatgccctcttctgtgctgagggctgtaccctcctacccatgggagcaccaggtcggccattctcagggttggtctcctgcggtttacagagcaccacagacctgccaaaggctttccacgtttgtgcagcaatcctcgagtgtttagagaagaggaagatatcctggctggcactctttcagttgacagagagtggtaagaaacacgctgctgaggcacaaatgcggagggccgctcttttcagaggcatcttgcaaatggttaagaacgagccctccttgaggttccttgctaagtaagtttataagctccattttagttgggacagattaagcacaaacttgtttaaagcaataagataatttactggctcactggtcaaccccaggaccaatgggcctatcatggggactgcctctctctgcaccacacccaccctcctgcaagaggtcgacccccccatcctctcccagctgctgacaggtacctgggtatcctcagctcaggctgttcgccccacactatccccacagccaggcctcccagggtacacgtcccgacccccaggggtgtccccagcactgataataggcagagatgtccagagttgcctgagccacttcttggtgttgcagacctcaggctggggcggctcctcctccgtgtggccccggatcagcacaccaggctgctgcctttcgctttttacaggtacctccacccacagggctggtcagggctgggcagtgtttcccagacccccatctcagcacctctgggtcccgccagatgggaagggttgtctgtgcctctgctccacagatgagcagtatcccttggcatcacctgctacctttccagcagtctgtagccatttgtcactatgtctttacctctagtcttctctcctacttccatgaagacgcggccatcagggaagaggccttcctgcatgttgctgtggacatgtacttgaagctggtccagctcttcgtggctggggatacaagcacagtttcacctccagctggcaggagcctggagctcaagggtcaggcaggtgcaagggccagtcccacctccaggggagctccccccagccggaggctccttctgccaaagaatgttccggcacagcatgcagactatgggggacacaccagccctgtttctgtatgtcttctaacctgtgagtttgcctgttttctctctagggcaaccccgtggaactgataacaaaagctcgtctttttctgctgcagttaatacctcggtgcccgaaaaagagcttctcacacgtggcagaggtaacgtcaagatgcccaccttgggccatgtgggggacatgagaattgacagctgcctgggccatgtgcctgcctggctggcaatacaactcgactatttctgccagagcccctcccctgtggtctgaggcctagtgggcggcatgggctgaggacctgctcctctctcacagctgctggctgatcgtggggactgcgacccagaggtgagcgccgccctccagagcagacagcaggctgcccctgacgctgacctgtcccaggagcctcatctcttctgacgggacctgccactgcacaccagcccagctcccgtgtaaataatttattacaagcataacatggagctcttgttgcactaaaaagtggattacaaatctcctcgactgctttagtggggaaaggaatcaattatttatgaactgtccggccccgagtcactcagcgtttgcgggaaaataaaccactggtcccagagcagaggaaggctacttgagccggacaccaagcccgcctccagcaccaagggcgggcagcaccctccgaccctcccatgcgggtgcacacgaagggtgaggctgacacagccactgcggagtccaggctgctagaggtgctcatcctcactgccgtcctcaggtgggttcgggcttcaccgcctggccctctgtggtcacagaggggctcggtggcccaggtggtggttccgcctccaggggcagggccttgtcctgggtctgtgtcagcgggtgcaccatggacatgtgtacattgaggttgtgggccttctcaaaccgccggccacactggtcacaggcaaagtccagctcagtctcagccttgtgtttggtcatgtggtacttgagggatgcccgctgcctgcactggaacccacagacctcacacctgggggacagaggcagataagaaggtgcgagggccacagccctgggagggggtcctgactcacacttactgcaaaggcttggctcccgaatgtcgcatttggtggacgagaaggtgcttccgctgcttgaaggtttgtccacattcgtcacagatatagttccgcacctctgagaggggagagtccagtgagtccaggcccctgatgctccaacctcccggggggacgacgatgacaatgtgaaaccatcacagctgggaagacatttctgcacatggttcaccatgcagtgggcccaagcaaggggcctatgagggcctcgtttattaagatctttaaactgctttatacactgtcacgtggcttcatcagctgtgtgcatttcaggatggtttttaaagaaacctcagaaagctatttccttaa

SEQ ID NO: 15575 - DNA, 78244 bp, Homo sapiens
agccgccgccggggctgtaggcgccaaggccatgtccgactcgtgggtcccgaactccgcctcgggccaggacccagggggccgccggagggcctgggccgagctgctgggtaggtgggcgcggcaggccgcgggagtgggcggcgtccggcccgggacggtttcgccggttccccgatcccttcccgccagagcctccgccggtcggatccccggacgccgcgcccggggggctgtgcggggtgggcgcccggctggggcggcgcggctgcctcggacccggcccctcctgcgcctgggcggacgcccccagccgccgcccgcggggcgctcccttctttcccgaacgccgcccccgccggccgccctgtcaggcgggcctggggtgcgcggcctggggctcccctcagcgcagaggccgcccctcgccagccgtccccgggctcccctgcctcgggccctcctgggccgtcttccccggcgtccgcggtggggccgtctccgttagtttcccgagacctgcgccctggggaggagccccggcccctcttcgggagggtgtcgctggtgggtttctccgcggcgtccacctgcgcgtcgggccggggaccccgtgtgtgaattgtgctgtgatggtttcgaaccgacttctctccgtagcgggaagggtcaagagggaaaaatataatcctgaaagggcacagaaattaaaggaatcagctgtgcgcctcctgcgaagccatcaggacctgaatgcccttttgcttgaggtaagaggaagctggtgtccgtctgcgggcagatttaggttcggggtttttgagtccagccaccgcacagctttcctaagaaaacacccgaggcggcgggcgcggtggcctggcccgcagaggggagggtcgcctgagcccgggagttctggaccaacctgggcaacggggtgagaccccgcctcttttattaaaaacaaaacaacaacaacaaaaaaacaggccgggcgccgtggctcagggctgtaatcccagcttttggggaggccaaggcgggtggatcactcagggtcaggagttcgagaccagcctggccaacatagtgaaacccggtctctactgaaaatacaaaaattagctgggtgtggtggcgcacgcctttaatcccagctactcgggagcctgaggcaggagaattgcttgaacctggacccgggaggcagaaattgcagtgagccgagatcacgccccttgcaatccagtctggattacagagtgagactgtctcacaaaaaaaaaaaaaaaaaaaaaaaaaaaaaaagccgggcgtggtggctcacgcctgtaatcctagccctttgggaggccgaagtgggtagatcacttgaggttaggagttcgagaccagcctgaccaacatggtgaaaccccgtcactacttaaaatacaaaaattagccgggtatggtagcaggtgtctgtaatcccagctgctcaggaggctgaggcaggagaatcgcttgaacctgggaggtggaggtcgccgtgagtgagatcccgccattgcactccagcctggacgacagtgagactccctctcaaaaaagaaaaaaaggaaaatagcccagtagggaagcattacttacacacaggttgtgtttatgcacagatcttgaattttttttatttttattttttattttcatttattttttttgagacaaagtctcacactgtagcctgggctggtatgcagtggggtgatctcggctcactgcagcctccacctcccgggtttaagtgattctcccgtctcagcctcccgagtggctgggactacaggcacgcgccaccatgccctcctaatttttgtatttttagtagagacagggtttcactatgttggccaggctggtctcgaactcttgacctcgtgatctgcccatctcggcctcccaaagtactgggattacaggcgtgagccactacgcctggcctggagcttgaattttttaaatggagtttgttgtgttttggattctaggtagaaggtccactgtgtaaaaaattgtctctcagcaaagtgattgactgtgacagttctgaggcctatgctaatcattctagttcatttataggtaagttatagcttcattttctctattttgaattgcagaagggtttttatatagtaaccatagtttgctaaattaagtagaaatgtaaattttctcaggcgatgggtttccactggtgtgtgtagtcgcaaattctatgggatgtttgtgtgacttgctcttgggcttcttacgatgctgtgtttaaaaacagcgtctgattcaacctgcgactcagaagcagtaggacccagagtgtcccttggaaaaacatgggacatagcaacagcagggatgtgccccttgctcatggaagtagtgagacaggctgtggtgtgcccaggagagcagacgggagaacaattttctaggtacctccttctccccccagtttgagagtgggagatagggtaagttctgggtcaacaacagtaagttattttctgatccttcacgtccttatgtgatgacttgtttctgttaaaataaccttcagtaatagcgctcccttgacaactggtcactgaatgtcattggcaaatgatacagattttcactgccatgattgtatttgaatttcacaaattgcatattatcattccaaggaaccaagctcagccacacagataaacctttaattcattaatttttgagtttgtttttttctgctaaagatatagttagtacatgcacgcacgtgcacacggacacacacacacacacacacacacacagtaaaagacttgtagataaaaaaactttcctatggagacacattggaaacaaatgactagaaattggcattgttggcctggcacagtggctcacgcctataatcgcagcactttgggaggctgaggtgtgcggatcacctgaggtcaggattcgagacgagcctggccaacatggtgaaaccctgtctctactaaaaaacacaaaaattagccgggtgtggtggtgggtgcctgtagtcccagctattcaggaggctgaggcaggagaattgcttgaacgtgggaggcagaggttgcattgagccgagacccctccattgcactccagcctgggcaataagagcaaaactctgtctcagaacagaaaatggcattgtctacttttttttttttttttaacagacagggtctcactctgttgcctggactggagagccgtggtgcaatcacggctcactgcagtcttgacctcctggcctcaagtgatcctcccaccccagcatcttgagtagctgggactacaggtgtgcgccaccatgcctggctaattttttcatagagacagggttttgccatattgcccaggctggtctcaaactcctgagctcaagcaatcagtttacctcagccacccaaggtgttgggattgcaggcatgagccactgtgccccatctgtctacttttctaccgagaatttcaccagcagctgatgatttctcgtactataattttaagcttctagaactattgtaaaattttttttttttttttttgagacgaagtgttgctctgtcgcccaggctggagtgcaatggcgccatctcggctcactacaaactctgcctcctgggttcaagcaattctcctgcctcagcctcccgaatagctgggattataggtgcccgccgccgcacccagctaatttttgtatttttagtagaggcggggtttcaccatcttggccaggctggtctcaaactcctgacctcgtgatcgacccgcctcggcctcctgcagtgttgggattacaggcatgagccaccgcaaccagcctgtaaatgtttttacttatgtattgataatgtgtttttagagccagtacattacaataacaggttcgtactgcagttaacagttttttttttttttttttttttttgagacggagtattgctcttgttacccaggctggagtgcaatggtgtgatctcgactcaccgcaacctctgcctccctagttaaagtgattctcctgcctcagcctcctgagtagctggtattacaggcatgcaccaccacgcctggctaattttgtatttttagtagagatagggtttcaccatgttggtcaggctggtctcaaactcccgacctcaggtgatccacccgcctcggcctcccaaagtgctgggattacaggagggacccactgagcctggcctccagtttttttttgttttgtttttttgagatgaagtctggctctgtcgcccagactgcagtgtagtggcgtgatctcggctcactgcaaactccgcctcctgggttcacgccattcttcgcctcagcctcctgagtagctgggactacaggctcccgtcaccaaacctggctaattttgtttttgtgtctttagtagagacagggtttcaccgtgttagccaggatggtctcgatctcctgaccttgtaatccgcccgcctcggcctcccaaagtgctgggattacaggcgtgagccaccgtgcccggcccggtttctttaaacaattaattttggctcacgtggtggctcacacctgtaatcccagcagtatgggaggccgaggcgggcggattaatgaggttgggaattggagacgagcctagccaacatagtgaaaccccatctctactaaaaatacaaaaaattaactgggcgtagtgacgcgtgcctgtaatcccagctacttgggaggctgaggcaggagaatcgcttgaacctgagaggcggaggttgcagtgagctgagatggcgccgttgcacttcagtccaggcggcagtgtaagacaccattgcaaaaaaataaaacaaaaaaaaattaattttggaagacaaataaattagaaaatgatttcttggcattgcctgcttccaggttgcccaccgtttctcactttattgaatgcagaccagtggctggttgctcaggagaatggtggctgcctgcaggctgttagtgaggttccacttggtggcctgcggactgagcacagctgtgactgcacctgcccaccaggtgcatggcagaatgttgggaaatccctgcctaattttatcacaaccatcaatgtgagtcaacaggggcaggcttatctctgaagtaattagaaaaacaatgtaattgaaagagcctgctgcagttctcaatttattgtgctcctttgtaaaaagatgataaagttcttggtcagaatatatttctttatcttgctccttttgtgtcatgggaaacgtaacaaataccaatgtataactctgggttcaggtgttgccaccagttttattgtgagctgcttggatcatcaaattctcatttttatctcatgtttttccctttgcatctattctccccgtttaaaaggcaattttttttgtgctgcatcttaaaataaggcattttaaacagcaagtctttggttttagattttgtctcatgtgttaagagaaagctatggttttgttttgtgtttaaggctctgctttgcaggatcaagcctcaaggctgggggttcccgtgggtattctctcagccgggatggttgcctctagcgtgggacagatctgcacggctccagcggagaccagtcaccctgtgctgctgactgtggagcagagagtaagacaccagcaaagatgaggaaacctgcccgttgttacttttaagctggttgggaaaataggacatagctttagtattgtttcaggtaatttgttttttaaaaaatgtaatctctcttttcagaagaagctgtcttccctgttagagtttgctcagtatttattggcacacagtatgttctcccgtctttccttctgtcaagaattatggaaaatacaggtaaatttgagattgcaaatctgactctccagtgttccaggcaatgttctgttgatctggatggaggcaacagagtacctgggttttcttgggaattctccaagcttctcattaattacagagagtggatgaaaaagggtttagaaatcatctgtggattggaaagaagtaccttcaattgccattttttgtccctattcacctatcattagtaatatttattagactagaatatattgaaaaacacgtttagccttgggtatattagtatggagaattttccagggtagtatagtaaactattaaaaaaaaatgtatgtaatttttttttccagagacagggtctcgccttgttgcccaggctggtcttttttttttttttttgagacgaagtctcgctctgtcgcacaggctggagtgcagtggcgtgatcttggctcactgcaagccccacctcccaggttcacgccattctcctgcctcagcctcccgagtagctgggactacaggtgactgccaccacgcccagctaattttttgtattttttagcagagacggggtttcaccgtgttagccaggatggtctcgatctcctgacctcgtgatctgcccacctcggcctcccaaagtgctgggattacaagtgtgagccaccgcgcctggcatttatttttatttttgagacagaatattgctctgccgcccaggctggagtgcagtggcgcaatcttggctcactgcaacgtctgcctcccaggttcaagcgattgtcctgcctcagccaccttagtagctgggattacaggcgcgtgccaccatgcccagttaatttttgtatctttttttttttttgagatggagttttgctcttgttgcccaggctggagtgcaatggtgctatcttggcttatcgcaacgtccgcctcccgggttcacgccattctcccgcctcagcctcccgagtagctgggattacaggcatgcgccaccatgcctggctaattttttttgtatttttagtagagacggggtttctccatgttggtcaggctggtctcaaactcctgacctcagatgatctgcccacctcggcctcccaaagtgccgggattacaggtgtgagtcaccgcgccctgcccaatttttgtatctttagtagagatgaggtttcaccatgttggccaggctggtcttcaattcctgacctcaggtgatctgcccatcttggcctcccaagtgctgggattacaggtgtgagccactgcgtccggcctttcccattcttttatccagcatacattatagaattcattagatttttcagttattgctttggtccctgccctcattatcacgtagcttgggaaacaagccactaaatccacaagaagtgcgatgattcatgtgctcacagatttgcgaagaagatgttggacatgcatatcagattggagagttaggaaagccttcctgcacggactgtgaagagtgcgagttaggggccgggcccagtggctcacacctgtaatcccagcactttgggaggccgaggcaggtggatcatgaggtcaggagatcgagcccatcctggctaacacggtgaaaccccgtctctactaaaaaatagaaaaaattagccgggtgtggtggcaggcacctgtagtcccagctactcaggaggctgaggcaggagaatggcgtgaacccgggaggcagagcttacagtgacccgagatggcgccactgcactccagcctgggtgacagagcgcgactctgtctcaaaaaaaaaaaaatagagtgtgagttagggggatgagaaggggaggctgcagggagatcagggcagtgtgacaggcacagtgttcacagtgagtggctaaagcagatcctgttttatcaaatgggagagggttgagtgagaaagacaagggacatgcacagggcacactgaagcctgacctttgtcctggcagcttcgaggagccagtgaaggcttctgaaggagagactgtcatgtcagtgtgtgtaatactgtgttggctgtagtgtggagaaagggttagaagtaggctacagtgcgtaggaagagagaaggaagagaagcaagtgttgggcaacggtgtgtgggtgcccaaaggccagggagtttgaaaaccagtacagctttgtaaaaaaagatgtgtttcaggctctaagtttttgcttgaggttaattttcaatacggcatggttaagaacctaagttgaacattttgtaggaaaatgcattcataaaggactcagaatgctgggggtttttttgtttttgtttttgtttgttttgttttgtttttcagagttctttgttgcttgaagcggtgtggcatcttcacgtacaaggcattgtgagcctgcaagagctgctggaaaggtagcgtgctaatgatgattcagtgttactgtttttgcagtctagtctagtataaattatatttcaaagcccagaatcagacgggtttgatttctggctttgacatataatttgtactagactagattgcattgcatatttatactagactagacctggaggaactattgctttattatttcaagagaacgtttatggtgttttggttttgtttgctttttgtctgttttttttttgagacggagtctcgctctgtggcccaggtgggagtgcagtggcacgatttcagctcactacaacctccacctccagggttcaagcaattctcctgcctcagcctcccaagtcgctgggattacaggcgcccgccaccacacgcagctaatttttgttatgtatttattttttttagggacagagtctcgttctgtcacccaggctggagtgcagtgacgtgatgtcggctcactgcaggctccacctcccgggttcacgccattctcctgcctcagcttcccgagtagctgggactacaggcgtccgccaccacgcctggctaatttttgtatttttagtagagactgggtttcaccatgttagccaggatgggctccatctcctgacttcaggatctgcccgcctctgcctcccaaagcgctgggattacaggcatgaaccactgtgcctggcaatttttgttatttttagtagagatgtggtttcgccatgttagccaggctggtgtcaaactcctaacctcaggtgattcccctgcctcggcctcccaaagtgctgggattacaggcatgagccacctcgcgcggcctttttttttctttttgagacagagacctgctatgtcgccaggctggagtgcagtggtgagatctgggctcgctgcaacctccgcttcccggattcaagcaattctgcccctgcctcctcagtagctgggactacaggcgcgtgccaccacacccggctaatttttgtatgtttagtagagatggggtttcaccatgttggctaggctggtctcgaactcctgatcttgtgatcctcccgcctcggcctagagcagaatttcatctcaaaaaaaaaaaaaaaaagaaaaacctgcttcctaggatatacacatcttatctcagcaccaaaatctatgaagcaaaaatggccagaattaaagggagaagtagacatttcagcaataatcattagaggtttcaatactcccctttcagtaatgggtagaacaagttagattaagaatgatatagaacagccgccccgtccgggagggaggtgggggagtcagccccccgcccggccagccgccctgtccaggaggtgaggggcgcctctgcccggccgcccatactgggaagtgaggagcccctctacccggccaccaccccgtctgggaggtgtacccaacagctcattgagaacgggccatgatgacaatggcggttttatggaatacaaaggggggaagggtggggaaaagattgcgaaatcagatggttgctgtgtctgtgtagaaagaagtagacacgggagacttttcattttgttctgtactaagagaaattcttctgccttgggatcctgttgatctgtgaccttgcccccaaccctgtgctctctgaaacatgtgctgtgtccactcagggttaaatggattaagggcggtgcaagatatgctttgttaaacagatgcttgaaggcagcatgctcgttaagagtcatcaccactccctaatctcaagtacccagggacacaaacactgcagaaggcctcagggtcctctgcctaggaaaaccagagacctttgttcacttgtttatctgctgaccttccctccaccattgtcctatgaccctgccaaatccccctctgcgagaaacacccaagaatgatcaattaaaaaaaaaaaaaaaaaaaagaatgatatagaagttgaatgctgcaaaccagctgacctgactgactgtggagcactctacccagtagtagcagagtgtgtattcgtaagtccaaatggaacagtccccaggatacagcataaggttcaggccaaggccaggtgcggtggctcacacctgtaatcccagcactttgggaggctgaggcgggcagatcacctgaggtcaggagttcaagaccagcctgtccaacgtggtgaaaccctgtctctactaaaattacaaaaattagctgggcaaggtggcaggtgcctgtaatcccagccgttgtggaggctgaggcaggagaatcgcttgaacttgggaggcggaggttgtagtgagctgagattgtgccattgcactccagcctggatgacaagagcaaaactgtttcaagagaaaaaaaaaaggttcaggccataaaacaaagaggaataaatttagaagggctgaaatcattcaaaatatgttctctaaccacaaatgaatttaattagaataaacaacagaagggaattgggaaaatccacaatatttgaaagttaacataatgagtcaaagaagtcacaagggaaattagaaaataacttgagactgggcacagtgccacaccagtcatcccagcactttgggagggcaaggtgggagattgttttgagcccgggagtttgagtccagcctgggcaaagtagtaagacctccagctgggcgtggtggtatgcgcctgttgtcccaactactcaggaggctgaggtggaaggattgcttgagcctgggaggtcgagggtgcagtgactgattgcgccactgcactccagcctcagtgacagcaaaaaactgtctcaaaaaaaaaattgggacatatggctcaactcaatcccctgatgatgggatttagttgagccttacgtctgcctctgtgtgtgtctccagccatcccgacatgcatgctgtgggatcgtggctcttcaggaatctgtgctgcctttgtgaacagatggaagcatcctgccagcatgctgacgtcgccagggccatgctttctggtgcgttcatgacaagatgcgggttcttgggtaaaactcattttgatctgtgataatgccttctgctctcaagagctctgcgaggcagaacagcctgtctctccgtggccgtgggaacctggcatgacagactcccagtctcagcctgttgtggggttgcattttacttgactgatgtggaaatactagtaagtcggccttgacatgagtttaagtgtttccattcacctttcccatagagtgaccgcagctgcttccttctgtcgcccaggctggagtacagtggcgcgatctcagctcactgcaacctccgcctcctgggttcaagtgattctctgcctcaacctccttagtagctgggactgcaggcacgtggcaccatgcccggctaattttttttttgtatttttagtagagacggggtttcattaggttggccaggctgctcttgaactcctgacctcgtgatgcacccccctcggcctcccaaagtgctgggattataggcgtgagccactatgcctggccttcctgaggaatgatattatgagaaaaacttgggactgtaatgtccccccacaaactaagaaggtgctgagagaccagaggatggctcagactagggaccaacccagtttgaggagtagttgggtttgtcagaagatggcttggaccagagtccagcttgaggagtagttgggcttgtcagaggatggctcggaccagagtccagcttgaggagtagttgggcttgtcagagaatggcttggaccaatccagcttgaggagtagttgggtttgtcaggacttatattcagcgcactcctggacggcggcaggacagctctagagaaccgccccaccacctgtctctaaggtgcattgaagctcgttttctggctctttgcctgctgtgtttgagtgatgagactcttttccttggtgagttctcagatcctctctgggatatttgggttctgaggaacacctgctgggagacccatcccactacaagtgacacctacaaataaaaattagatgagaaactgatctgtacagtagcttgtgggttttttcctttttcctaaagctttttggtggcatgagcgacttagcattcctgagctactataacctggtaccagataggttaaatttaaatcaaagttagaaaatcttgtggatttcagtcctcttggtcttattttttaaaaagctaagaatgcctttcctcccccatcacattcctcagaataggatgcttctgggtccctctagaccctctggtattggagattggcaggcaagacaatccataagacctcccttggaaaccacttttatttaagagaaaaaaattgggctgggtggggtgactcatgccagtaatcccagcactttgggaggccaaggcaggtggatcatgaggtcaggagttcaagaccaacctggccaagatggtgaaaccccatctctactaaaaatacaaaaattagctgggtgtggtggcggcgcctatattcccagctactggtgaggctgaggcagagaattgcttgaacctgggaggcggaggttgcagtgagcgagatcataccattgcactcaagcccaggcgacagagcaagcctccgtctcacaaaaaaaaaaaaaaagaaaaaaatctgactataaacttgttccctttcaaatagaagtgcaagaggaaaaaatctggttcatctaagggtcctgattgggtttggtgaacgctagtgtagctgtggtcaggtgagcagtaacttctgcagcgttcctcaggttaggagcagctcacaggggtcctggtgggcccaagccatatgctcacccgcccctctgaagtggatggtctgtgccattcacagttgcttggagaccatgatgtccataaataactttggttttatggtttttcagattttgttcaaatgtttgttttgaggggatttcagaaaaactcagatctgagaagaactgtggagcctgaaaaaatgccgcaggtaggaggaaaagtcaagtgaagagtttagcggaaggagccgtccttattccaagtgttgaaatgtatttacgtgtctctctattgaaacgtgctgtttgtacctatttacggggtacatgtgatacttgttttgtgcatagagtgtaatgatcaagtcagggtgtttagagtctccgtcacctccagtatgtatcatttctgtgtgttggcaacatttcacatgttgcagttactttgaaatatacaatctgttgttaactatagccgcctcactctgctgtggaacattagaacttacttcttctgtctagctgtatgtttgtacccattaaccaactctcttcgttcccccactgcatatacccttctcatctctggtatctctcgttctactctctacctccacaagagccactttttagctcccacatatttgtgataacatgcaatatttgtccttctgtgcctggcttatttcacttaacataatggccttcagttgcattcctgttgctgtgaatgacaggatttcactttaaaaaaaaagaatagctggccgggcatggtggctcatgcctgtaatcccagcactttgggaggacgaggcgggcggatcacaaggtcaggagatcgagaccatcctggctaacatggtaaaatcccgtctctactaaaaaaatagaaaaaattagccgggcctggtggcaggcacctgtggacccagccactcaggaggctgaggcaggagaatggcgtgaaacctggaggcggagcttgcagtgagcccagatcgtgtcactgtattccagcctaggcgacagagactccatctcagaaaaagaaaaaaatagctgaggttgggctcaatggctcatgcctataatccagcactttgggaggctgagactggtggatcccctgaggtcaggagttcaagaccagcctgaccaacatggtgaaaccctgtctctagtaaaaaaaaaaaaaaaatagccgggcgtggtggcacatgcctgtagtcccagctacaggcgtggaggcaggagaattgcttgaacccaggaggcggaggttgcagtgagccaagattgcgccttgcactctagcctgggtgacagagcgagactccgttaaagctgaccagtattccgttgtgtgtatataccacgttttctgtatccggtcatctcttgttgggcacacaggttgatttcatatcttggctattgttaatagtgccacaataaatgtaggagtacagatgtctcttcagctggctgatttcctttcctttggctgtaagcccagtaatgggattgctggatcatatggcagttctggttttttttttgtttttttgtgtttttttgagacggtgtctctctctgttgctcaggctagagtgcagtggcgcgatttcggctcactgcaacctctgcctcccaggttcaaccgattctcctgcctcagcctcccgaatagctgggattacaggcatgcaccaccatgcccagctaatttttgtatttttagtagaggtgaggtttcactctgttggctaggatggtctcgatctcttgacctcatgatctgcctgccttggcctcctgaagtgctgggattacagatgtgatccaccatgcctggtgaaagtgagaccctctgggctggtagttctgtttttagaactacccaactatttagaaatctccatactattttccataatggctgtattaatttacattctcactgatagcatataagagttctgtttgcattctcaccagcatttgttattttttgttttcttgataatgataattctaactggagtgaaataatagctcattgtggctttgacttgtatttccctgatgattagtgacattggcttttttttttttttttttgagacagagtcttgctctgtcgcccgggctggagtgcagtggcgcgatctcggctcactgcaagctccgcctccggggttcacgccattctcctgcctcagcctcctgaatagctgggactacaggcgcccaccaccactcccggctagtttttctatttttagtagagatgggctttcacagtgttggtcaggctggtctcgaacttctgatctcatgacccgcccaccttggcctctcaaagtgttgggattataggcgtgggctaccgtgcctggcctttttttttcttttttcttttttttttttttgagatggagtcttgctctgtctcccaggctggagtgcagtggtgccatcttggttcactgcaagctccgcctaccgggttcaagctattctcctgcctcagtctcccgagtagctgggactatagacacccgccaccgcacctagctaatttttttgtatttttagtagagacagggtttcaccttgttggtcaggctggtctagaactcctgacctcaggtgatccacccacctcgacttccgaaagtgctgggattacaggcgtgggccacagttcccggcctgtttctgggttctctatcctgttccgttggtctgtgtgtatgtttatatcaacctcatgctgttttcatttctgtagcctcgtagtatattttgacctcaggcagtgtgatttctatattctatagctttgttctttttcctcaggattgctttgcttatctgtgttctattttggttccatgtgaattttagaatctttttttctatttctgggaagaacgttattggtattttgatagggattgcattgaatctgtagatagttttggatacgtcccaaatttttattcccttttggaggttcctgagccagtggctcccattttgcctacactgcagtctgtgggctttgtttgaggaagtctgttttattgttaccatgagttgctctctgagtagtggtatgctttaagcccaggagatgtgaagaagggaaatggacaatggtaccttctcaccgtcttctggctccagaggcatcaagggtgaaagtccttagttccacagcccagattcaaggcctgagctttcctctcttcactgaagtacttcagcaaaactctgcgtgcaaaagtgtcctgcccagccctaggctcatggcctcaggccatgctgagagcagtcttagggtaattccagaaagttcagccttttcactctgtctaggtcccttcggtactggagtaatttctaggtctatgagggtttttaaagttgatctctttgtaaagtccatttctttttcttttttccgagacggagtctggctctttcgcccgggccggactgcagtggcactatctcagctcactggaagctctgcctcccgggttcacgccattctcctgcctcagcctcccgagtagctgagactacagggcgtccgccactgcgcccggctaattttttgtatttttagtagagacggggtttcaccatgttagccaggatggtctcgatctcctgacctcgtgatccgcccgcctcggcctcctgaagtgccgtttctttactttagagtaacaagtaataattctcttgtgtgatgcaggtatcacacaaattacagaagattaccaagatggtaactcacattctattttgacaggtcacggttgatgtactgcagagaatgctgatttgtaagttaattgcactgcagcccagactgtaaatgacttagtttgcttattagcaattgtatcagttttctgcctttccatttgaggtatttctcctctgtatgtttcactgtgcagagtcctggtactggaatgcccttgttttggcattttcagagctgtgaagggatacctcatgaatctgtgggtcacagggaagcattttcttgtctgtgtgttttgattaaggcctacagattgtagaagtcttgatggatgtgggccctctggggggttgaagtggatctgttgtctgaaagcgcctggggattgtttctggtgggctgccgccgtgtgctgacatctgttttctgttcctggctctgtcttcagttgcacttgacgctttggctgctggagtacaggaggagtcctccactcacaagatcgtgaggtgctggtatgttcctgagggtggcctgcctgagtgtgcagcagggaggtgtctgccaaattaaagagccaagatattttaaacacttccagagcttcagcagcccgctcctgagcacacttcctctgccagttacgataacgtgcgtgaggaggaggcgaccatgggaaagcccggggaacgctctggtcagccttttcctgtgaggatgaggtcggaaggtgcgcccactgcagtatcctgttccgcctctggaagtcctgcaccaatgtttgtcccactcactgtgacctcctcctgtgtggagtctccccttgctcctccttccctgggtgtgattcaggctctagagctggccctgcctctcagccccccacatttctagaacacactgtagctgtgcctctacagactcccgctgcctggcctccacagatcctgctcagattcaccagtaggcaaagcttggccctattagctttttctctccatggctctgtggagatgtgcggagacccttacaggtcgggaggcggaagctgaggagtgggggctgggtggaaggtggacatcggggtttggtggaaatggggctctggggtttgcttccctctagtgtgggcaggggaccttgaagtgaagtcttgagaaaccagtagaatttgccactgtttccaggccttgtcaaccttttcattctttattttgctcctcatttcccatccctcacagtaactgtttaactgctcaattaaatgtgttgtaccgttcggtacttttactgaaacagtgaataaagcactgtgtgatttcctgaatgtttacatgtgcatcagttagcttgggctgctgtaacaaagtgccagagactgcggtgtggacggcagatgtgttctcacagcagtggaggctggaagttggaggtcagggtgcccctagggttgggttctggtgaggaccctcttcctggcttgcaggagacctactttttctgtgtcttcatgaggtagagaggggagagcaagccctctggtgtcttctccgggcagtcatctcatcatcacctcagccttatcaacaccccaccttgagaggctgggcttcaacagaggaactttgtggggatacagtttagtctgtggcaagggcttttttttataatctgtgtgataagattactcacactgatgtcctgagagtcaggtaacaaccactgacctgccgatttttatattttgtaattagttgccaattatttatttatttatttatttttgagacagagttttattcttgttgcccaggctggagtgcagtggtgagatctctgctcactgcaacctctgcctcccaggttcaatcaattcttctgcctcagcctcctgagtagctgggattacaggcatgcaccaccacacctggcacaagcctatagttttgtattttctatttttaagtagacatggggtttcactatattggtcaggctggtctcgaactcctgacctcaagtgataacacccacctcagcctcccaaagtactgggattacaggcgtgagccaccgcacctggcctgccaataatttaaaatcagacatcctccaacagtcttggtggccagcttcccttgcacactgggggctgtggtgtcccaaagccctgccctgtgaggaaggacagcagggctgagaagtgaatctccacgatgtcccacaccctgttgtgtgagtgtcttgagtttgcacagagccgacgtggcctcgttgggtgtgtgaccctggggcagttcactgaaccgccaggacccttgattttctttctttctttctttatttttttgagacagagtctcactgtgtcgcccaggctggagtgcagtggcacgatctcggtttactacaacctatgcctcctgggttcaagcgattctcctgcctcagcctcccacatagctgggactataggtgtgtgccaccatgcctggctaattttttttatttttctttttttgagacagaatttcgctctgtcgcccatgctggagtgcagtggtgcgatctctgctcactgcaagctccgctccctgggttcacaccattctcctgcctcagtctcccgagtagctggaactacaggtgcccaccaccatgcccggctaattttttctatttttttagtagagatggggtttcgttgggttggccgggatggtctcgagctcctgaccttgtcatctgccccccttggcctcccaaagtgctgggattacaggtgtgagccaatgcgcctggcctaatattttggtatttttagtgtagatggggtttcaccatgttagccagggtagtcttgatctcctgaccttgtgatctgcccgcctcagcctcccagagtgctgggattacaggcatgagccaccgtgcccggctggacccttgattttcttacctggggaatcggcataaagtgccgcttgctggttgcaggttgtaagcctcacgagagggtctgggtttggtttggtggtctgtataggcctgctgggatgtggcaggctaacagacctcaagtgctcttgccacctggctctgtgaccccattcacccccagaacatcgtgttctctcacacagatggcccaggaaaccttagtcccttccattccttcctcatcttcatggacagagctggcctcagtccctgttgtgactgtttgaggccctggtgtgctgggctcttctctcaggcttggcacgaccctctgggggagttccgtgtcacagagggtgccgctgaggccccgtcgggttggctcccggggctccactcccgggtgcggcgcggcctgcccttcccaacctgtttccttctgctccactcccgggtgtggcgcggcctgcccttccccacctgtttccttctgctccttcgcttctctgctccgtgggtttcgccgttgccttgccccctttctcgttgaactgccacctccttggattcagtttcaagtctgtggttatagtggcctggccaagaaagccccttccttgcttaaagaagggatgagcctgagccacagtttgtgctgggattggtgggtggcgtgcaaggcaccctccctttcctgacccctctttctgctgcattggcaggttcggagtgttcagtggacacacgcttggcagtgtaatttccacagatcctctgaagaggttcttcagtcataccctgactcagatactcactcacagccctgtgctgaaaggtaggcccagtgtggaggctgctcagttgctacccattttggggattgctgttgccttgttgccttggtaacgctgactggagatgccaggaattctaggacctcttttacgtctgtcttgaaccagagactgggtcctcagatgcctgagattgttactaaatatccttttacctgaaagcaacagatttttataagaaaattcagaattatgagtggacaaaataattgtcattaaaatagaaatatcttttttgtttgtttgtttgagtcagagtctcactcacttgcccatgctggagtgcagtggcgtgatctcagctcactgcaacctctgcctcccaggttcaagcaattctcgtgtctcagcctctcaagtagctgggactacaggcgccaaccaccacacccggttaattttttgtatttttagtagagactgggtttcaccatgttggccaggctggcctcgaactcctgaccttcggtgctccacctgccttggcttcccagagtgtcgaagtgttgggattacaggtgtgagccaccgcacccagcgtaaaatagaaatatctttattttatttatttatttatttatttatttatttatttatttattggagatggagtcttgctctgttgccaggttggagtacagtggcgtgatttgggctcactgcaacctccacctcccgggttcaaaccattctcctgcctcagcctccacagtagctgggattacgggcatgtgccaccatgcccggctaatttttgtatttttagtagagacgggctttcaccatgttggccaggctggtctcgaactcctaatctcaggtaatccgcccgtctcggcctcccaaaatactgggattacaggcgtgtgccgctgtgcccagccgctgtctagtcttttaaaacttggtgtttgagcatgcacattctccttctggaatacctgatcacccagcacaactcacgttatctttctgctggctacccttgccttgctgtgactgtgtcatggttctcagctagactcggtggcgtgtttgatggcccaggcatcgtctgcccagtgggtgtcctgttacccatgtatgacagactgtacccaagatatcagtcttacgaataaggccacgatgaacactttgagctttttctgtatctagcatatccccagggtagatgctcaggcaggaaactggtgggagatgagggatacacagatggctcccaacaggtgctgtgaggtgctcaggagtttatcatcacttgactgagctgagcttcctttgaacagcatccccaccatgattggtttattcccagtttatcttattttatgtatttatttatttttttgagacagagtcttactctgttgcccaggctggagtgtggtggtgcgatctcagctcactgcaacctctgccgcctgggttcaagctattccctgccaagcttgaattacaggcgcctgccaccatgcccagctactttttgtattttgagtagagacagggtttcaccatcttggccaggctggtctagaactcctgaccttgtgatccacccacttcggcctcccaaagtggtgggattacaggcgtgagccacctagcctgaccttactgacagtttaaaagcaggaaaattgaaatgcagttggtacattggaaaatatttattgtgaatatgacaaagcattacaagtaagtaaccgggcctgagaaacagaattgatgatatagcaaataggcaacaaacagggagatggtgaactttaataactgaaaaagtacatattaagatctgtcttcacactgaagctttgaaacacaactttttggccaggagcagtggctcacgcctgtaatcccagcattttgggaggctgagacgggcaggtcacgaggtcagaagttcgagaccagcctggccaaaagagtgaaaccccatctctactaaaaaatacaaaaattagccgggcgtggtggtgggcgcctgtagtcccagctactcgggaggctgaggcaggagaatcgcttgaacccgagaggcagagcttgcagtgagccgagattgtaccactgcactccagcctgggtgacagagtgagactcagcatcaaaaaaataaaaatacaaaaagtatctgggtatggtggcacacgcctgtggtcgcagctacttgggagactgaggcaggtggattgcttgagccagggaggtcgaggctgtggtgagcactgcactccagcctgggtgatagtgagaccctgtccaaaaacaaaacctgtgggcggcaagccacccaggcaccaaggcaagagaccgaggacacgagctgttctagtataataaaatataaaacaagaatagttataccagatatagatcttagatatgattacatatgaatatcattaatcattagttggtagtaattactgtttattgcaatattataataatcctcgctctataatcataacctaggaaaagccaggccatacagagacaggagctgaggggacatggtgagaagtgaccataagacaagagtgtgagccttctgttatgcccggacagggccaccagagggctccttggtctagcggtgacggcagcgtctgggaagacgcccgtcaccaagcggatcgtggtccagcggtagcaaaaggtgtcaaggaacaccactcactacttagaccgggaaagggactctccctttccccccgggagtttagagaagactctgctcctccacctcttgtggagggcctgacatcagtcaggctcacccacagttatccggaggcctaaccgtctccctgtgatgctgtgcttcagtggtcacgctcctagtccaccttcatgttccatcctgtacacctggctctgccttctagatagcagtagtaaattagtgaaagtactaaaagtctctgatatgcagaaataatggcataagctgtctttgtctctatctcctctccctctctgcctcggcttccaggcagggaagggccccctatccagtggacacgtgaccttacctatcattggagatgactcacactctttaccctgccccttttgctttgtatccaataaataacagcacaaccagacattcagggccactaccggtctccgcgcattgatggtagtggtcccccgggcccagctgtcttgtcttttatctctttgtcttgtatctttctttctacactctctcgtcgccgcacacggggagagacccaccgaccctgtggggctggtccttaacaaaaacccacaactttttgatctctgacttgaagtttttgtctgtttctccccctgcagcatctgatgctgttcagatgcagagagagtggagctttgcgcggacacaccctctgctcacctcactgtaccgcagggtgagtggatgtggtattatacctgcttctgagctcgtggcggggggattaagatctgcctagtacttgtcatgctgcctgccgtggacggcacatcgagaggttcagggatgtctggtgagatgtggctgtcctcatcaaggccaccactcaggtcaggagactgaacttgtcccttgggccgagcccctcctccttgagatagggagaattctctccaagcaggtgctggccactgtgaggggagagacgccacggtgtgagctgtcacagctccatgtgttacctttgcagtgggaagtgagggggctgcggtggccaccggctgggaggaaggtgaggggtcatctgtcgcacattggtttgcttggatattgaagggagcggatgcttttatttcagctctttgtgatgctgagtgcagaggagttggttggccatttgcaagaagttctggaaacgcaggaggttcactggcagagagtgctctcctttgtgtctgccctggttgtctgctttccagaagcgcagcagctgcttgaaggtgagcttttacgcgagcccggtggtgctggtcaagagtgtgtgtaggggggtgtcagcagagtcccagctgactgtgggtgagcctctcagtgaagcccttccctacctgcccggaacctgcagtgcctcctgtcgatggaacattctttgtcagacgcttccataagcactgactgctgctctgagaggccagagtgtccactgctgcttcattcaggtctctagtggtttgcacttgacatgctgtaattgctgtgtagtcttttaaaacttggtgtttgggtgtgcacagtctccttctggaatacttgatcacccagcataactcacgtcatgttcctgctggctgcccttgccttgctgtgactatgtcatggttcttaactagactgggtggcgcgtttgatggcccaggcattcgagagctgccagctggacagcatggtcactgcgttcctggttgtgcgccaggcagcactggagggcccctctgcgttcctgtcatatgcagactggttcaaggtaagtgacctgccaatcggctacctaatacctgatcttcccagaaggcctgggagtggggaccatgctgtccccacctgattctctgtcatgtgagtgagcaaccttgctgtcagctttgccgagtggccttggcagatcttcctctgcgtgtgccgaggagcctgggttctccctgtcggggcctcagcggatcttcctctgcatgttccgaggagcctgggttctccctgtcggggcctcagctccttcccctggtttctgtctcacttagttgacggagcctcctgctgtcttttataagaaaattagcgaaatcaagcctggacaccatagtgaaacctcatctccaccaaaaaaaaaaaaaaaaaaaaaaaaacacacacacacacacacaaaacaaaaactacgcaggtgtggtggcagacacctgtagtcctcgttactcgggaggctgagacgcaaggattacttgagcctgggagatcaaggctgcagtgagctgtgattgcaccactgtacgccagcctgggtgacagaaggagactccatcccaaaaagaaaaaaaagaaaatgagtgaaatcaggaaagaggggacacagaagtggatgctgctttttgcagagtatacaatgtctcttattttccctttttttttttttgagatggagtcttcctctgtcgcccaggctagagtgcagtggtacagaaagctcaccttctcggctcactgcaaactccgctgccccgtttcaagctattctcctgcctcagcctcctgagtagctgggattacaggtgtgcactaccatacccagttcatttttgtatttttagtagagacggggtttcaccatgttggtcaggctggtctctaactcctgacctcatgatccgcccgtcttgtcctcccaaagtgctgggattacaggcatgagccagcgcacctggcctttcctttttatttatttatttatttattttatttatttacttatttatttttttgaggtggagtctcattctatcactcatactggagtgcactggtgcgacctcggctcactgcaacctcctcctcctgggttcaagcaattctcctgcctccgcctcccgagtagctggggttacaggcgttcgccaccacacctggctaatttttagtagagacagggtttcatcatgttggtcaggctggtctcaaaatcctgaccttaagtggtccgcctccctcggcctcccaaagtgcagggattacaggcatgagccaccgtgcccagccttgcgtctctaattttcacgtaagtcctgaaacaagtacttcatttcttcagccgtatcacatattcttcctttttctttggaacacacacagtgtgctctctgacagaagtttatgcagctgttcctgaacctaagtgggcattagactcgcctggagggggctttggaaataaagatccagggcccatttgagactactgagtctgagctcctgagacctcagggatccctgggcaacccctgtgaaaacccccagttcatgtggggagttgggtgtatttgagatatcagctttgaaggaccgccatggtttctcttttagtgcttgtgagtaaagtttccatttgaagagctaatttttgtagaagttttgggttcgggccaggtacagtggctcatgcctgtaatctcagcagtttgggaggcctaggcaggaggattgcttgagcccaggggttcaagatcagcctgggcagcacagtgagaccccggtctctacagaatgtaacaattagctgggtgtggtggtaagcacctgtggtcctggctacttaccggctgaggcaggatgattacttaagccgaggaggttgaggctgcattgagctgggattgcattactacgctccagcctgggagacagagcaagactctgtctcaaaaaaaaaaaaaaaaaaaaaagtattgagttttcctgccatcaccacctcggtgaagtagttgcctctttgtaggagtctcagctccctgaaattttcaagggctgcggtgcctgcatcgccatcgtggctgcggtgcctgctccccccccaggccttctgaggagctgaggctgcacaggaggctgagccgcatctgcttgtgttgggagaaggtggtgactggtgcagtgtcagtgtcaactcacttctattccttaaagttccttctcacctgccctcaggctctccccagctctgcccagttagcctggggcttccactaaactaagaggagaggtgtttgttctgtccttttagtgaggcgctgagagatttgtgccagaatccacctggtgctcttgggtcaggagttgatgggtctccccgagccgcggctcaggtgtctccctgggctgctttttcttcggttccagaggcgacagttgggagaggaatactctgaagtgctgtgttggtggtggtgttttggttttgtttgcttttcttttaccttttcaaatcaactttatcaaaatatagtttaaatgaaataatgaaaggtatccaatttaagtgtaccattaaatgaggttttttgtttttttctgtttgtgttttcttttaagagactgagtgttgcccaggctggagtgcagtggcatgatcatagctcactgcagcctttacctcctggggtcaagcagtcctcctgcctccgcttccagagtaactgggactataggtgtgtgccaccacacccagctaattaaaaaaaatttttttgtaaatacaatgtcataccgtgttgctcaggctggtctcagattcctggcctcatgcgatccccgcaccttaacccccgaagtactggaattacaggcatgagccaccatgtccagatagttagatgagttttgataaatgtatatatgcatattcagtgtttgaacatctgtttttgttatgttttgttttgtttttgagatggagtccccgtctgtcaccaggctggagtgcaactcccacctcctgggttcaagcgattctcctgtttcagcctcctgagtagctgggactacaggtgcctgccaccacacctggctaatttttgtaattttggtagagatggggtctcaccatgttggccaggatggtctcgatctcttgagtttgtcatccgccccacttagcctcccaaagtgctgggattacaggcatgagccaacgcacttggcctgaacatctgttttaatttttacttttgagggcaaataccagcactgtgggaggacgaggtgggccgattgcttgagcccagtagttcaagaccaccctgggcaacgtggcaaaaccctatctctaccaaaaatacaaaatttagctggtatggtggcaggtgcctgtaatcccagctactcagaaggccgaggcaggagaattccttgaacccggaacgcgcaggttgcagtgagccaagatcagaccactgcactccagcctgggcaatggagcaagaccccgtctcaaaaaaaaaattttttttttttacttttaggaaatgttaatataagtagaccaaatgatcgtgaatttgagccctttggggtaattaatataattctcagcatatcacattatgtagttaaatgtaatttgtggggtttttttgtttgtttttttgaggcaaggtctctgttctgtctcccaggctgggatgtggtggtgtgatcatggctcactgcagtctcaaccttccaggctcaaatgatcctcccacctcaacttcccgagcagctgagtccgcaggtgtatgtcaccacacctggctaattattaaaaaattttttgtggacatagtgtctcactatgttgccctggctggtctttttgtttttttaagatggagttcgctcttgttgcccaggctggagtgcagtggtgcgaccttggctcacggtaaccacctcccgggttcacgccattctcctgccacagcctcctgagtagctgggactacaggcgcctgccaccacacacggctaattttttgtatttttagtagagacagggtttcaccgggttagccaggatggtctcgatctcctgaactcgtgatctgcccgcctcagcctcccaaagtgttgggatcacaggcgctagccaccgcgcccggccgtcctggctggtcttgacctcctgggctgaagtgatcttcctgcctcaacctcccaaagtgttggaattaccggattgagccactgcacccagccattaagtgtaattttttcaaaaatagcaaacagaactgccttttatctcagcaactctaacaatggctgctgtgaccccaggtctggcttgcgcgtgtcacttagatgctttacagaaatgcctttggcgacgggtctggactgttcctgctgcggccagtgatcatctggctcactgttaattgagtgaacgttgccaagagacaggagcagttgtgttgtggatggctgaatggagggtgataagacatggtgtgcttggcgggagaatttcaggttgaaactgggtgctgatgttttgagaagggaacccttgagtggtctcaggttttatttaaatttttaactgacaagtattgagctgctttcctggtatttggcacagacagttcatgtctctgagctttgtttttccgtgactctgtccctctcagagacatttgacaagcgttatcagcattttccgctttttatctaatggctttttgggtctgtctgcatgatgataacattcaaaagaatctacacatggtcaggtgtgatagttcatgcctgtaatcccagcactttggaaggccgaggcaggtggatcacttgaggtcaggagtttgagaccagcctggccaacatggcaaaacctcatctctactaaaaagacaaaaattagctaggtcagacgtggtggctcatgtctgtaatcccagcactttgggaggccaaggtatcacctgaggtcaggagttcaagagtagcctggccaacacgatgaaaccctgtctctactaaaaacacaaaattagccaggcatggtggtgcacacctgtaatcccagctactcaggaggctgaggcaggagaatcgtttgaacctgggaggcggaggttacggtaagccgagattacgccactgcgctccagcctgggtgacagagtgaggctttgtctcagaaaaaaggaaaaaaaaaaccgggcttggtggcacgtgcttgtagtcccagctacttgggaggcagaggtgggagaatcacttgaacccgggaggcagaggttgcagtgagccctgattgcaccgttgcactccagcctggatgacagagtgagactctctctctcaaaaaaaaaaaaaaaaaaatagctgggagtggtagcaaatgcctgtaatctcagctactagggaggcaggagaattgttcaaacctgggtgggcggacgttgcagtgagccaagatggcaccactgcactccagcctgggtgacagagcaagactctgtctccaaaaaaaaaaaaacaaaacacaattttgcacgctttcagaaagaccaaggtgagccttcagttcacgttggagttcaggtttcctgatagatggtaacttgctgaggtttcaccaggatgtcctgtggtctcaagtggggctagggtggcaggagctcgtctggttttgcaggtaagcggttcagtgttcacagaggcccacattctgtctgcaggttcactatgatgcgttcagggccatgcccatttaaaatctccttccttccctgactcactgcagcccccaggactttgctgcagcccccttcgttcctgggagggtttgctcatgttcctcgcttgctctgctagggtcttgcagcttcattgtctgaggggtggccctccttggcctgtgttccttacccacctctcttgcagtgatctgtccactggtggatgaggttagaagttaaagtgtgttcagaagtggcttcatcccacaaaatcaatttgtttgctgtgcacaaacacttcttagggcatttagcaaattgtacccctaaggatcccaaaaggatcccatagttagtgtttgttatagctaatgatttttaactgtttttcttcgaataacttttagatatctcttcagtcaaagcgcagtcgtgacatctgtaaatgtatgaaccacatgactttttggtgtttctcttttttcctttttgtttaggaggccgactacagcagccgcccggacactgcctaggtgggcttcacactcttctctccacacaggacactgcctaggtggtgcagctgcgcctggctgtcctgggcttcacgctcttctctccacacaggacactgcctaggtggtgcagccgcgcctggctgtcctgggcttcacgctcttctctccacacaggcctcctttgggagcacacgaggctaccatggctgcagcaagaaggccctggtcttcctgtttacgttcttgtcagaactcgtgccttttgagtctccccggtacctgcaggtgagaagctggctgccacatccatgatttctggtgcttcgctcacctgctgcatctgaggactgccttggcctccccaagagcctcctgcagatctgctctgagcctctcagccaggcccttccccttccccttccccttccccaagccgtttatggtgaaacaacacaaacattgcaactggaggtgtccacgtggacacacagtgagtgcgtgtgtgccagtcaaggcaactgctaagaaacccttttctcacctaggccaaggaggtgggtagatatattatgtcactgttcagtctccctcaaaacagtgagcaggtctgagtggtgacgtggagagacgttctcagcacccagttacgcaggaagagcgagttgtactgcagtgagggttttaggatctcatgtttgcttttttttttttttttttaatttcatgtgggttttttttttgtttttttgtttttttgggtttttttttttgagacagtctcactctgttgcctaggctagagtgcagtgttgccatcatagctcactgtagcctagacctcccaggtcaagcagttctcccacctcagcgtcctgagtagttgggactacaggcgcatgccagcaaacctggctgttttttctttttttcttttttttagtacagatggggtcttgctgtgttgcccaggctggccttgaactgagctcaagtgatccttccgccttggcctcccaaagttctgggattacaggtgtgagccactgtgcccagcctgaccctcatcttttaagaaaattggccgggcgtggtggctcacacctgtaacccagcacttttggaggctgaggagggcagatcacttgaggtcaggagttcgagaccagcctgaccaatgtggagaaaccccctgtctactgaaaatacaaaattagccgggcgtggtagcgcgcgcgtagtcctagctactcaggaggctgaggcaggagagttgcttgaacccgggaggcggaggttgcagtgagccgagactgcaccattgcactccagcctgggcaataagagcaaaactccctctcaaaagaaaaaaacacgctgtgtcccctctgtcccctttgaccaggaagtcaaaggcatggagctgcaggcggccggggccggttcctgctgccgctgctaggattgcacatccctggttcccccagtgagccgccctggacttgcaggaccagctacattagggtttcttgatttttcacctggggaagcagccttctattgtgttttttttttgttgtttttttttttggaaatgaagtctcactgtgtcacccaggctggagtgcagtggcgcgatctcggctcactgcaaggtccgcctcctgggttcccgccattctcctgcctcagtctcccgagtagctgggactactggtgcccaccaccgcgcccggctaatttttttgtatttttagtagagacagggtttcaccatgttagccaggatggtctccatctcctgacctcgtgatctgcccgcctcagcctcccaaagtgctgggattacaggtgtaagccgctgcgcccggcttgtgttttaattttactaatggtttgctttgcatactcataagtctgactgtaaagggctgtgtttctctactcagcactgtggatgttggaagtgaattgtggcctccctggagtcccaggcagttcccagactaacggtgctgcgctctgctatctatcctcaggtgcacattctccacccacccctggttcccggcaagtaccgctccctcctcacagactacatctcattggccaagacacggctggccgacctcaaggcaagctgtccctccatgcccactcctcacacctgtcccagcagaaactgctttgttttcttgttctcattctgtgtcttccctgaaggtttctatagaaaacatgggactctacgaggatttgtcatcagctggggacattactgaggtaatgttgcttgagccctgcagggtctcagccagtcacgcccaccatgcaaaggtccagtttcttttgactcttgagttgagtttttcagccttcccagtctcatgtctggtcttgcctcgggcgcagctgggggcgaggctctgcgggcctctgtgttgctgtgtcccaccttgtgtgtccccagcattggcagggaaagggttactgtgtggcagagtgaagtgcctcaggctgcaggacatttgtccttttgggagatcttggttcctgtggggttgaatggagaggtggttcgtcatgtttttctctgaatcacagaaaagtgttaactttttttttttttttggagatgcagtcttggtctgtcaccaggcttgagtgcagtggcgcaatctcggctcactgcaacctctgcctcctgggttcacgccattctcctgcctcagcctccagagtagctgggactacaggagccgccaccacgcctggctaatttttttgtatttttaatagagtcagggtttcgccatgttagccagaatggtctcaatctcctgaccttgtgatccgcccgccttggcctctcaaagtgctgggattacaggcgcccgccaccacgcctggctaattttttaattttttttagtagagacgaggtttcaccgtgttagccaggatgatctcgatctcttgacctcgtgatctgcccgccttggcctcccaaagtgctgggattataggtgtgagccactgctcctggccaagtgttaactgtttttatagcagccaaatgtcagatggtcatgtgatatgtgtgggtcactaatgaaaacattcttttttttttttgagatggagtctcgctctgtcgcccaggctggagtgcagtggcgcagtctcggctcactgcaagctctgcctcctgggttcacgccattctcctgcctcagcctcccgagtagcctatagtgggcctacagatgcctgccaccacgcctggctaattttttgtatatttttagtagagatgaggtttcaccacgttagccagtatggtctcgatctcctgacctcgtgatccgcccgtctcggcctctcaaagtgctgggattacaggcgtgagccaccatggccggcctaatgaaaacattctttactttttacttttttttttttttttgagacggagtctcgctctgtcgccctggctggagtgcagtggtgcgatctcagcttactgcaagctccgcctcccgggttcacaccattctcctgcctcagcctctccagtagctcagactacaggcacctgccaccacacccagctaatttttttgtatttttttagtagagatggggtttcaccatgttatccaggatggtctcaatctcctgacctcgtgatctgcccgccttggcctcccaaagtcctgggattacaggcatgagccactgtgcccagcgtattgtttttttttttttttttttttttggaatggagtctcgttctattgcccaggctggagtgcagtggcgcagtctcagctcactgcaagctccgccttccgggttcatgccattctcctgcctcagcctcccgagtagctgggactacaggcacccgccaccacgtcaggctaattttgtgtgtttttagtagagatggggtttcaccgtgttagccaggatggtctcggtctcctgacctcgtgatccgtctgcctcggtctctcaaagtgctgggattacaggcgtgagccactgcgcctggccctccattctttactttttaagacctttttattttaaagttacgagttactgaagaacacttataggtgacattaaagtgttaggtgaaaatatttaatataattttccatttataatttattgctgtttataaattactttttttttttttttgaggtgggatgttgttctgttgaccaggctgaagtatagtaccgtgatcacagttcagtgcagcctcaaactcctaggttgaaacgatcttctcaccttgacctcctgagtaactgggagtacaagtgtgcgccaccatgcctggctggtttctaaaattttttgcagacatagggtctccctgtgtggccgagactggtcttaaactcctgggctcaagtgatccttccgccttggccccccaaaatgctgggattacagatgtgagctgccgcgcctggcctcagaatgtttttttttttttttgatgcagggacttcccctgttgcccaggctgcagtagggtagcatgatgatggcttactggagccatgatttcctgggcacaggcaatccttccacctccacgtcctgagtagctgggaccactggctcatgcctctacacctggctaatgtttttgtatttttttagagatgagatgtcatcatgttgcccaggccgggcttgaactccttgggcttaagcagtctgccccgcttagcctctcaaagcactgcgtttatagacatgagtcatggcacccagccctcgtaatttcttttaatctcaaaaattaagtctctactccttcccacctagaaatctttactttcaactctttcctggaggcaggaaagaggctcacggcaggctctcagcagagctgagctctcgaggagggccgcacatcacggggtctgaaccttgtgtgtgtggaggtggcagtgtcatcctcccctgtcgtgctggtattttgggacattttggagtgctccagggcccctgctgtgcgcacagcatgtgggcctttacctttaatgtgtacagagcctttcaacaaggaagcacaggttgagtgtggccttcactgctcagtcttttctttaaagtcctctgttctttttcctttcctccctgtatgggaaccagccccacagccaagctcttcaggatgttgaaaaggccatcatggtgtttgagcatacggggaacatcccagtcaccgtcatggaggccaggtaggctgggctgccgaaaaggcctctagcagctgcagtgtgtgcagaccgcgctctgatgcctgcagtatgtgcagactctgctctgatgcctgcagggtgtgcagactccgctctgatgcctgccagcgtctggggctctttggagtgtgtcccatttctgcccagagccacatggggcaggttggccactgtctattcagagagagacaggagtcagggctgtgaatcgaggatcctgccgttaagggatacggggtgaggtcaagagctgtgcatttgctgtgaaacattttttcctctgtaaaagcaggtgatgcccctcccgtgctgaagcagccaacaggaactgctgattggggagcttgcactgggagggaaggcagtggggccatgatgtttttttttttatcaatgccttctttgtgaccaatatggagtcagtaacagagagctgaatagcacagctttattgaatttggtatgatctcaaaacatcttgaattctggtggttacacatgtggatgagctgattgcagctcccagggttttgaaatttagctccaaggaaattgccccaaatggaccttacatggtcctcgtggcctcagattgatccaggctccacgttcaagcccagggagcaggccgaatgtggtcctgattcccacggactcagggctgggctagcacggcctgccctacacatgccttgtcccggaactgtgcacaagaagacttcataatgcatcgtggctttggagtgagccctcgcagtccactctctgaaacaccggtcaccgtctgtgggaattgccttctcgctgctctgactgatgcactgtctgcttctctgtgttgcagcatattcaggaggccttactacgtgtcccacttcctccccgccctgctcacacctcgagtggtcagtatgcgtctccatgagtttgtgaccagttgtgtagaaagcaaggactttccttgtcagtctctcacaggtctcttctcttcccacagctccccaaagtccctgactcccgtgtggcgtttatagagtctctgaagaggtatgcagcaacggttagaaggggatgactacttccaggtttcttctgacaatgcgaagaattgtggatcttctgtagagaaatttgttagaccactattgtgttttattggtaaaatattggctccaaaattggttggttacttttttttttttttttttttttttttttttagttggagtctcactctgtcacccaggcttggagtgcagaggcgagatcttggctcactgcaacctccacatcttaggttcaagcgattctcttgcttcagcctcctgagtagctgggattacaagcctgtgcctggctaagtttttttttttttttttttttagatggagtctcgctctgttgcccaggctggagtgcaattgcacaatcttggctcactgcaagctctgcctcctgggttggagcaattgtcctgcctcagcctcctgagtagctgggattataggtatgcaccaccacgccctgctaatttttgtatttttagtacagacagggttttgccatattggccaggcggttctcaaactcctgagctcagaagatgatctacccacctcatcctcacagagtgctgggattacagatgtgagccaccgctcctggcctttttttttttttttttttgagatgaagtctcactctgttgcccaggctggagtgcagtggtgcgatcttggctcactgcaccctccacctcctgggttcaaggaattctcctgcctcagcctcctgagtagctgggattacaggcgcgcaccaccacgcccggctaatttttgtatttttagtagagacggggtttcaccatgttagtcaggctggtcttgaactcctgggctcaagcgatctgcccacctcggcctcccaaagtgctgggattataggcgtgagctaccgcacccggctgcatcattcttcagtgaaagaaaatgtttcagtacataatgattgtgcagagaggagaactgaaggaaaatgaaagagctctgggaaagcctcatgctgcagaacttgagagtagacctggaagttattgtttagaataataaggtatccttggatcacttacattgcaggtttctagtaagaaagttggttggtatcaaccaactttggaagaaataggaaagtataagtcctatattccagcaaaatttataaagttctgggacctgtaagaagataaacacaaagagccttttttttttctttttttgtatttttagtagagacagggtttcactatgttggccagactggtctcaaactcctgatcttgtgatccacccacctcggcctcccaaagtgctgggattacaagcgtgagccaccatgctctgcaaaaataattttttaaatcttaaaataagtttattctctgggatccttactttcatttgttttgagacagggtcccactctgtcacccaggctggaatgcagcggtgcagtcatggcttactacagccttgacctcctgggcttcaacagtccttccctctccgcctcccaagtagctgggtctagaggcgtgctccaccacacccagccagccttgatctcctgggcttcaacaatccttccccctccgcctcccaagtagcagggtctagaggcgcgatccaccacacctggccagccttgacctcctgggtttcaacaatccttccccctctgcctcccaagtagctgggtctagaggcgcgctccaccacacccagccattttgtaaatgctttgaggacacggattttcgctgtgttgcccaggcttctctctctcttggcctcaaataatcctcctgcttcaacttcccaaagtgctgggattacaaatatgagccactgtacctggcttaccctttatcatgttaagaaagttccctcttactaatttgctaaggatttttagcatgaactaatgcgttttatttttttttctttaatttattttttgagtcggagtctcggtttgtcagccagtctgcagtgcagtggcgcaatctcggctcactgcaagctccaccttctgggttcatgccattctcccacctcagcctaccaagtagctgagactgcaggcgcccgccaccacgcccggctaattttgtttttgtatttttagtagacacagggtttcactgtgttagccaggatggtctcaatctcctgacctcctgatctgcctgcctcggcctcccaaagtgctgggattacaggcgggatccaccgcgcctggcccaattttgcatatttttaatgacacgaactaaacgtttttcttagtattaatcattaaaattaacaaagattcatgttttgctgggcgtggtggctcacgcctgtaatcccagcactttgggaggctgaggcaggtgaatcacaaggtcacgagttcgaggccagcctggtgaacatggtgaaactccgtctctactaaaaatacaaaaaattagctgggcctggtggcaggcgcctgtaatcccacctactcgggagggtgaggcaggagaattgcttgaacctgggaggcggaggttgcagtgagccgagatcgcaccactgcactccagtgtgggtgatagtgggagactctgtctcaaaaaaaaaaaaaaaaaaaaaaaaaagaaaaacaaagattcgtgttttgaatttggaaattaccaaaaattgtatgagagaaatagaaataatttataatttcactgcccagggataatcactggtggtattttgtggtctagctccttagatattaatatatgattaatatgatatattttgaaacagtgctttttaaatctatatatattttttaatatttttttgtaaaaacaggctcatactgtacacagtatttataatttatttaaatttaatatgtttttattttataatagatttggggattgtaatcttgaattaatttaagccatagctgacttaattgtattgttttcctgtgatccagagcagataaaatccccccatctctgtactccacctactgccaggcctgctctgctgctgaagagaagccagaaggtaagttcctgggccgcttgtccactctgggacttgtgcttttccattttcctaaccttgagtgtctgttgtgctacaccacccgagtgagctcgggggtggctgtgccagctcaagccggtgctttgggtacagggtccgcccaccatgctgacgcccagtgccagctgtggcacagactcttacctgggggtcctgaagaatcacttagcaccttccggaaaggagtgtgtgcagtgcacagccccactttgtcactcgtcatcttcctgtgggccgcactgaggtgtttgtacaggcttcagactcgggtgctctctcagcggccaccttggggcccacagcgctggctcgagcctgtcgtagggagtgtcatgcagcacttttctgttgcacagtgcaggtaggagtagaagtcaggctcttttggcctgtggggagcagtggtgcagctgtcggtcagacctacgccctcattgggaatccgtgaaaggctgcactcaggcagcagtgggagatgccatcatgaggctggtttttcttgaagtgtgtggctttatctccagtagaagccagcatctccctgtgggagccgctatgagctgaagacatagatctgaggctgctgcttccctgtgggctttttttttttgagacagagtctcgctctgtggctgtggactgcagtggcgcgattttggctcgctgaaacctctgccccctgggttcaagcagttctcctgcctcagcctctgtaatagctgggattataggcacgcactactacgccttgctagtttttgtatttttagtagagatggggtttcgccatgttggacaagctggtctcgaactcctgacctcaactgatccgcctgcctcggcctttcaaagtgctgggattacaggcatgagcaaccgtacccagccccttgtgtgctcttctagatccccttccacctgcagggccagggaggctcgttgagatttttttttttttttttttttttttgagacagagtctcgctctgttgcccaggctggagtgcagtggcgcaatctcagctcgctgtaagctccgcctcccaggttcatgccattctcctgcctcagcctcccgagtggctgggactacaggcgcccgccaccacacccggctaattttttgtgtttttagtagagacagggtttcaccgtgttagccagaatggtctcaatctcctgacctcgtgatccacccgcctcggcctcccacagtgctgggattacaggtgggagcccccatgcccggccgacccaccctgagagcatgacctctcagttgtgctggggatgccacaggggcctcagggctgtgtaccctgcggtgtgaggcgtttgcttctcttgagaggtgtcctccttcccccaggatcctccttcccctggggtccacttgttcgtagcttttggtggcttccagaatggtttctaatcatttgtctgatgaggcttatgcacagactcctagagcctatgatttctagagcctgtgatttctggtttcattttggctgtggctgtgcatagcagtgcattttcatgcttgtgtcttctccagcaaccccagaacttgaaggttttttactttaaaaacatatgcagcgtatcttcctttttatattgaaagtggtggctgggcgcagtggctcatgcccgtaatcccagcactttgagaggccaaggcgggcaaatcatgaggtcaggagatcgagaccatcttggccaacgtggtgaaatcccgtctctactaaaaatacaaaaaattagctggatgtggtggtgcgtgcctgtagtcccagctactcgggaggctgaggcaggatgatttgaacccgggaggcggaggttacagtgagccgagatcgcaccactgcactccagcgtggtgacagagcaagagtccatctcaaaaaaaaaaaaaaaaaagtttgaggaaccaggggactaaatggtcacctatccgtgatcctgtccccaccctcgccagccctcgatcctccttgttttcttccgtgtgtatgcttctcacggtggtggagtggtattgatggtgcacacagaaccgctttttttcttaaacttgtttataaatgtaattttttatgaaactcgtttataattgtaattttcgatgtggcatccagcatcagggaagacacctcatttacctcctcagagactcccagtccctccgtctgccacacacagcagcttggaagttcacagctctgtatttgactgtgtgaagtttctatttttgcagtgaagagtcctgttgagtgtctttccatctggtttcttccttcttctcacagatgcagccctgggagtgagggcagaacccaactctgctgaggagcccctgggacagctcacagctgcactgggagagctgagagcctccatgacagaccccagccagcgtgatggtgaggatggatgggagctcatgctgtgtctcatgtgtgcagcctgtggttggagctctgtggctgggccattttccccatagtgacatcaggctggtgtgtcttcctagtagtccagtagtttaaagattgaccccgggctggcgggtgtggaaccttttttgagacaaggtggaaggctagtcctactgaagctgtcacagacccttggcagaaggtgaatattcggctagttgcatctgagtaggacgaatgatgatagagaagaaaacgcgtgactaggatgcctgttttcccgctcatcctgcctgccggagtcgatgtcacatcagacacacagggtctctgccctgtgatcctgcttccatgtgatggttttctgtaaaatccagagtaagaaatgttcatctgtggattgagaacatgcagtttcttttttcttttttttttttgagacagagtctcactctgtcccccaggctggagtgcagtggcgccatctcggctcactgcaacctccgcctcctgggttcaagcaattctcccgcctcagcctcccaagttgctaggattacaggtgactgcctccatgtctggctaattttttgtattttttagtagagatggggtttcaccatgttggccaggctggttttgaaatcctgacctcaggtgatccacctgtgttggcctcccaaagtgctgggatttcagtgtgagccaccgtgcctggcctacatggaggtgatatatatatatttttttgagacggagtcttgctctgtcacccaggctggagtgcagtggcgtgatctcagctcactgcaagctccgcatggaggcaatgttaacacagcttggttagcgctagctggggctgcagcgccttggcggtcttcactcagaccaagtgcgccagttcctgagtgcagccttccggtgattcaatgatggcttgtgcagaatgtggtacatgggggacatggaggaaaagttccagtgcttaagcaagaggttgatacatgtcaggtgagtcctgtttctaaaagcaaagcggttttcacctttaaatgatgtagttgggctatgtgtggcccatttccctgggccaacatggaacctctggcatgcgcttaggcagatgtggtgtctggagggctggcatgggatttcagatggggaggttcatgttggtgaatgaacatgtccccctctcagccaatcaggaaaaggtagtggatggcgtctggccccatttgccatgacacatgctgcaccacaaggctgcaaatcctgcggggcgaacaaacactggtgttcagcacctggctgggggatgtgtgcagtcagcaggatccgtggaatcgtacttgacgggaggcggagctctctaggccgcagctgtatccctcctttcggggttcttgtcatccctaactagtttcttccttcgcagttatatcggcacaggtggcagtgatttctgaaagactgagggctgtcctgggccacaatgaggatgacagcagcgttgagatatcaaagattcagctcagcatcaacacgccgagactggagccacgggaacacatggtaggtgtaggggctcagaacaaagcagggggtcttcaccattttccattaggcagaggcattagacgcatggagccttctctcaatttctgtttgacttgctcagttagtgtcgtatcagatgttccagggccaggcagcggtgtaccagggtcagctgccacagtctgtttgtgtatgaagagctccttttacattttatttatttatttaattttggagacagggtcttgctttgttgcccaggctggagtgcagtggtgcaatcatggctcactacagctttgacatcctgggctcaagtgatcctcttgtctcagcctcccgagtagctgggactacaggcgtgcatcaccacacccggctaatttctgcattttttgtacagttggggtttctctgtgttgcctcgactggtctagaagtcctgaggtcaagtgatctgtctgcctcagcctcccaaagtgttgggattataggcataagccacggcacttggcctctttttttttttttttttttgactgagtcttctctgttgcccaggctggagtggacgatcttggctcactgcagcctccacctcctgggttcaagcagttctcttgcctcagcttcctgggtagctgggattacaggtgcacaccactacgcccagctaatttttgtatttttagtaaagacagggtttcatcatgttgaccaggttgggctcgactgcctctttagaatatgcgacagaggctgtttctggccccaaaacctaaaatatttttctggccccttacacacaaggtttgccagtcccgcctgctgctgtagaattttgtgattggcgattacttgagggctgctattcccaagattggggaatgggggccctgggcaccagtttgcattgtaacatgccctccaaacaagcctgttttggaggtctttttgcaaagcagaattgcgatgtctgtggcgggagcgctggccggcttccttcctgctgctcccgtccccaggacaccacgctcatgagaactgtgtctctgcaggctgtggacctcctgctgacgtctttctgtcagaacctgatggctgcctccagtgtcgctcccccggagaggtgaaggcgcgggcagctccctgagtggtggggctcctctgggtgccacctcttgctgggccaagtctgcagaccagggactcatgagctcgtctccgcaggagcatgcggcgatgctgagtttcatcaaataggacgcagcagaagttgggaagcactgcagaagatgggttgtcttccagaaagaccactgttttggggaacagcttggctctttcttcggccgctggtggttggattagctgttggagggatgtgcaggactgaatggctagtactgatggtttcacggctgtctctgcaggcagggtccctgggctgccctcttcgtgaggaccatgtgtggacgtgtgctccctgcagtgctcacccggctctgccagctgctccgtcaccaggtgaggctctccttcatgggggccacccttgggggcccactctgagggccaggctgctacttctcaattcgtcttcagtgccctggaaaattccagcttggaagagggcagtctgctctgccaccctcattctcgttgcagggcccgagcctgagtgccccacatgtgctggggttggctgccctggccgtgcacctgggtgagtccaggtctgcgctcccagaggtggatgtgggtcctcctgcacctggtgctggccttcctgtccctgcgctctttgacagcctcctgacctgtaggacgagggattccttgttcttctgcctgaagtgagctcttcttccacagtcgcgtcttctctcctctctctcgaaaagtgacacatgctcgtttgataaaattagaagagacagacatgcagacataccacccaaagataaccactttttagcattttggtatatatccttccagaattttatctgtcatttgtttataatatgcgtgcgtttgtttctttgttcataaaaatgagatcatattatactaaactgctgaaattaatagtagatagtaactgtctatatcgttaagcattctttgatgtcctggtgagagctgctttgttttgtcttggtcccttgtctggcccttggttggaccagctccctctggtcaggttcttcggcaccccatggtgagtagcttcccagtgtgtacacctcgggctgtttctctagggctcagcagatggggccatgtgctgaggtgaggaaggaccctgtggttaagaatggtctgctcagtgcctcaagggctccctgcagctgccacgcacaggcagaagccaggacagaatcccttcagctgccactcagaggcggaagccaggacagagggctgggagactctggtgggagttgctggctggggcttggcttgtagcttctggtctcttgggcagaggtagcccaggtcgggacagagccctgttgcggtgccggagaccctgtgcgggaaaggggagatctgacattatgacagggtctgaataacagagaacttagaagaggcgcaagaaatgtacgtggagcaaggagagggagtcagatggcagctgtgcggatcccacacctcagacatgggcctcggggagcaggcactcggtactccggggatacagagtccctcctaggcgcttggccacaccagacagtccccactcaccccaggccccaaacactgagtactgggtgttggcatgagaggcacacagccaatggagaagttgggagctggtgaggagggaggcatccaggtggcttgggggagacagggccatcctctcttagaaacacagagatgcctcaggatatatatccaggtgaagaaagcaaaatactgaactcggtctcagatgctactttttgcataagaaagggagaatgaaatatatatttggtgtgtgttttgtttttttttttgttttttggtttttggtttttgttttgagacagagtctcactctatcgtccaggctggagtgcagtagcgtgatcttggctcactgtaacctccgcctcccgggttcaagcagttcttgtgcctcagcttcctgagtagctgagactacaggtgtgcaccaccatgcccagctaatttatgtatttttagtagagatggggttttgccatgttggccaggctggtcttgaactcctgacctcaagtgatctgcccacttcagttaggattacaggtgtgagcctccacgcccagctcaaatatgtattagtaaaacagaagtattagaactgtaagaacaccatgacagtgctttgacatctccattgcctcatggaatctcattctgagcttccttggttacaagtgagaatttttcacatgggtattgctgtaggtatgtatgttgagtaaatgacacaggtctcactgtgtcccccaggctgaagtgatcttcccacctcagcctcccagtagctgagaccacaggtgcacacccacacacccagctagtgagagatggggtctcactgtgttgcccaagctggtcttgaacttctgggtttaagtgatcccctgagctgtgattgtgcgactgcactccagcctgggcatcagagtaaggccctgtataaaacaaaaaataaaccgagggctgggccaggcacggtggctaacgctgtaatcccagcactttgagtggctgaggtgggcagatcacttgaggtcagcagttcgagaccagcctgtccaacatggggaaaccccgtctctactaaaaaaaattaaaaactcgactggttgcagtgactcatgcctgtaagcccagcattttgggaggctgaggtgggcggagcacgaagtcaggagatcgagaccatcctcgctaacacggtgaaaccccatctctactaaaaatacaaaaaattagctgggcatggaggctggcacctgtagtcccagctactcgggagactgaggcaggagaattgcttgaacctgggaggtggagggtgcagtgagccgaaatcgcaccactctactccggcttggcaacagagcaagactccctctcaaaaaaaaagcactaacaacaactacaacagaatcagctgggcatggtgggagatgcctgtaatcccagctacctgggaggctgaggcaggagactcgcttgaacccgggaggcagagattgcagtgagcccaggtggtgccactgcactccagcctgggcggcagagcaagactgtctcacaacaaacgaaccaaaaaacgaaggaccaatgctcaggccatccagttcggaatgcactaaattcagttttatgaaattcaaagtaactttttccttcatcccttattttgtatggattacatttatatgttataatttctgttttcagattttgtacagcagcaatttcttactctctctgcaagttttcttcccagtcacgagatactttgtgcagctgcttatctccaggccttattaaaaaggtaggttcactcttttcctatttttccattctgccatacgtttcaggtttacgcagctttcggaccggaaggccgaggtctgctgccgctttgtgcccatctcaggggcagctcctgggtcaggctggctgtcatggggcagctcctgagtcaggctggctgtcatggccacctctgctgtctgcttaggcagcctgactgctgagtgctgcctttccttgtgttctctgagtgtaaagtgaagttgtatgaagacaactacaagtctgtaattgtaatgaaatagatgttggcatttataggatagatgaattaaaagatcagtattcataataagtatctttccctggaaagaagaattcttattcctctcatctagtaaatgttccttacattgttcagacaaaggaatttttttttttttttgagatggagtcttgctctgtcgcccaggctggagtgcagtggtgcgatctcggcccactgcaacctccacctcccgggttcaggcagttctcctgccttagcttcccaagttgctgggattacaggcacgtgccaccatacccggctaattgttttgtatgttttttagtagagatagggtttcaccatgttggccaggctgttttcgaactcctgacctcaagtgatccacccgccttggcctcccaaagtgctgggattacaggcgtgagccgctggtgcccggcccagacaaaggaatttaaagatgagcattggaaaccctgaatgtcaaaagtaaaggtgaaatggcactgcaaaccagtgttgtccttttataggattttaatgaacgtctcgtgtataaaatagtggttttcaggctgggcgtggtggctcatgcctgtaatcccaacactttgggaggccgaggcgggcagatcatgaggtcaagagatcgagaccagcctggccaacatggtgaaacctggtctctactaaaaatacaaaaattagccaggcgtggtggcgcacgcctgtaatcccagctacttgggaggctgaggcaggagaatcgcttgaaccagggaggcaaaggttgcagtgagccgagactgcaccactgcactccagcctgggcaacagagcgagactccacctcaaaaaaaaaaaaaaataaataaataatggttttcaacttcaggcttcacattagaatcaactgagaagcttttgaaactatagattcctggcccctttccagataaattaagtcagaatctgggagcagcccctgaggatccagggtgcacgtatttccagttatttcctctgaggaactttgtccctggtgccaagtttttaaagaaaacatggagtttgagcttaggagagggcagcgtggttcccacccagcatgctgagcagggacgacagtccttggagcaggctggttataaacatgggaggctctcatctcctcgggggcagagatggacacggtcacgcagcaccaatagtgtgtctggcttgtccagttggtgtgcatttttggtgggaacgccattcctggcagaggcctagagatgggctgtttcactgcccgggaccaaaccagccctacccctgggaggcagttttgttcctgcaattctgcttccagacatttagctcaaggaagcagtcagatggcaggaaggtctgcacataggctcttccctggagcactgtgcacagccatgatcgctgaggggctctgcacccttccaggggctggactgaggtcccctgaacgtggggttgtgtgttgtgccctcccaggggctggactgaggtcccctgaacgtggggttgtgtgttgtgccctcccaagggctggactgaggtcccctaaacgtggggttgtgtgttgtgccctcccaggggctggactgaggtcccctgaacgtggggtcgtgtattgcgccctcccaggggctggactgaggtcctctgaatgtggggttgtgtgtgtgggctgttgatggtctgtttccacctgagcatttgctcagccactcacagtgaaacttgcgcaatgaagaaacggccgggtcactctctgtttcagtttcagttcctcatgttcagattgttctcagaggcccgacagcctctttctgaggaggacgtagccagcctttcctggagacccttgcaccttccttctgcagactggcagagagctgccctctctctctggacacacagaaccttccgagaggtgttgaaagaggaagatgttcacgtaggtgaccgttccttctcctgcatcatgccacgtcctgagtctagggtttgtgtgtgctcctcgggcaagaacagcagcacgtaggtgaccgttccttcccctgcatcatgccacgtcccgagtctagggtgtgtgtgtgccgactgtctcctcgtctcgagtctagggtgcgtgtgccgactgtctcctcagaggcaagaacagcagcacttagatggtttgattggaatcttgactaaaatcgttgtggcctcatgtgcagctcttaagaaattatacagatactgggcacggtgctcacacctgtgatcccagcactgtgggaggccaaggcgggttgatcacctgaactcaggagttcaagaccagcccgggcaacatagtgaaaccccatctctacaaagaatgcaaaaattagctgggcacagttgtgtgcacctttggttccagctacttgggaggctgaggcaagagaaatcacttgagcccaggaggtggaggttgcagtgagccaagatcacgccactctattccagccaggatgacacagcaagaccctgtctcaaaaaaatatattaataaatacagagaaaccctgctatactttctcagtttctcccaacacgaacttctttttttatttttactgatatattttttgagacaacgtctcgctgtgctcagtggtgcagtcttggctcactgcagcctctgcctcctgggttcaagcaattctcatgcctcagcctctccagtagctgggactacaggcgcctgccaccacgcccgactaattttggtatctttagtacagacggggtttcaccatgttgtccaggctggtcttaaactcctggcctcaaattacccacacgccttggcctcccaaaatgctggaattacaggcgtgagccattgcgcccgagaacttgttttttgttgttgttgttgttttgttttttttttctggtggagtcttactctggggcacagtggcgcaatcttggctcactgcagcctctgcctctctggttcaagtgattctcctgcctcagcctcccaagtagctgggactacaggcgcgcaccaccacgcctggctaagttttgtatttttagtagagatggggtttcaccatgttaggctggtctcgacctcctgacctcgtgatctgcccgccttggcctcccaaagtgctgggattacaggtgtgagccactgcgctcggcccctgggaacttgttttaaacatgtctgccaggctgtgtggtggtcactcagggtctctgggctcacccatgtgtgcctggttactggagctggcattgctctcaccagtgtgccttggtactgatttatttctgaggatgtttgcctggttgttttggtctttagaaaagaatttcaaggtggctgggcacagtggctcatgcctataatcccagcactttgggaggctgagatgtcaggagattgagaccatcctgggtaacacgatgaagccccatctctactaaaaataggaaaaagtgatccttctgctttggcctgccaatatgttgagattgcaagtgtgagccactgtgccaagccttttgtgaaattattttattatttttaaattattatttttttttttggagatggaatcttcctctgttgcccaggctggagtgcagtggcacaatcttgggtcactgcaacctcagccttctgggttcaagggattctcctgactcggcctcccaagtagctgggaccacaggtgcacgccaccgcgcccagctaactttttgtatttttagtagagatggggtttcactgtgttagccaggatggtctcaatctcctgacctcatcatcctcccgcctcggcctcccaaagtgctgggattacaggtgtgagccaccacgcccaaccctttttttttttttttttcgtatttttagtagaaacagggtttcaccgtgttagctaggatggtctcaatctgctgacctcgtgatctgcctgcctcggcctcccaaagtgctgggattacaggcatgagccaccgtgctcggcctcctaaaaatgtttttaaaaaacttagctggtcatggtgatgtgcacctgcagtcccagccatctgagaggctgagggggagaattctggagttcaggaggcagagtctgcagcgagctacgattgcaccactgcacacactccagcctgggcaacagaacctgtttccaaaaataaatgaaggtatgctactgtgaatagctgtagaatgttgttgttttgttagtttcttttttcttttttttttttttcctttttatagatagttctcactctgttactcactgcagccttgacctcctgggctcaagagatcctcctgcctcagcctcccaagaggctgggaccacacacatgtgccaccacacctggctgatttttaaatcttttgtagagacggggtgtcaccatgttgcctaggctggtgtcaaactcctaggctcaagcaatctgctggcctcagcctcccaaagtgctgggattacaggcatgagccaccgtgcccaggtaatttttaaatgagatgaggtcttactatgttgcccagactaaaatagccgttttatacttagaaagaaggattacagtactaacatctttgtgctagggaaatcctgtaagaaatcattcttgataaaactaaggtttctttcctgtggaactctcagctgcaatttcattataacacagggacatggaggactgcgtatgagatgaaatgacaaactggtttataaacctgtcggtggattgtgtgttctgtcctcattgtattgaattgcttgctctctttctcagttaacttaccaagactggttacacctggagctggaaattcaacctgaagctgatgctctttcagatactgaacggtaagtgttgaaaagagctaccctggccaggcatgatggctcacacctataatcccagcactttgggaggctgaggcaggagatctcttgaatccaggagtttgaggtcagcctgggcaacatggggaaactccatttctacaaaaaatagaaaagaaattagccggacatgcggcacgttccagtcatcacagccacttgggaagctgagcaggagcattgcttgagcctgggaggtagaggctgcagcgagctgagatcacaccactgcactttagcctgtgcaacggagtgagaccctatctcaaaagaaaaaggagcttccctttaaaatgttacacggttttccacattgccttaaagcctatgtttcgtcattttatcctcaatttaatgtttggtttacctgttaatctttgagcacaatttcaattttttttttttcggtggcaagatttattaaagcaaaagcgaaagtaaagcttccacgcggtggcaatttctgtttttctttttttttttttttttctgagacagagtcttgctctgtcacccaggctggaatgcagtggcgcgatctcggctcactgcaacctccacctcccgggttcacgccattctcctggctcagcctcccgagtagctgggactacaggcgcccgccaccatacccagctaattttttgtatttttggtagagacggggtttcaccgtgttaaccagggtggtctcaatctcctgacctcgtgatccacttgccttggcctcccaaagtgctggcattacaggcgtgagccaccgcgcctggccaggttgcccaatttcggttgttattcctttatttaagaaacatttactgagctcctaccatgtggcagacaattctagagtgttctagaagcagggagtatagaggggaataaacaagcctgcccatatggcacctttgtatcaatgagggcagatgtggcacgtataaggcacccacttagacttcaccctaccctggctgggctatggctgctgtccgggagctgtacacctgtgtccaggccctggcaacacacaggtagatacagaagtggattaaaggtaggaatgagccctggagataacagacagggccgtgtgagaggaaatgaccaggcaggagcagaggctggtgtggagcaggtggtgcagactttgaggagtgatgccagccttgacttgggggcaccaagaagtgggtaaatgaagcagtgaacccccatgagtcccagggctgatgactgagaccatttgagactatttgagaggccagatgtgctgttctgggcataggagtagggagcccagaggaccgttgggtttaagggtgtggagtttagggtggaggtcagggagaggggaatgtggtcactgcagatatggagtatcctggtgggtatatgggcctcagggtgcctgccacacctagactcaggagagggttggcaacagccaccctgtgctcctcgtccttccggccatcaggggccttccaggcacatgcagcactgtcgcctgcacctggatcctggtatcagattctggatgaaaccaatggaagtaataggaaaaggaaaacataggggccacaaaaagaaaactcgctgctgcctgcggcaaaacacgtgctgatggttcaggtcgtgccaagcccgctctgcaggcgcttccttcactcacccccgtttctcctcccggctgctctctggggtggagtctaaggaggaggtcagagggaggggcttgtctgctgcatgaggtcatgctgcatcaggtcaccgctgcgtggaagttgtgttgagatgtgttgcgggattttctttcttttctgaattacttaagtgatacttagatacattctgtgccagttccagacagtgtgggtggagcaccccagttccggacagcgtgggtggagcaccccggtcccggacagcgtgggtggagcaccccggtcccgcacagcgtgggtggagcacccaggtcccgcacagcgtgggtggagcaccccagtcccggacagtgtgaggagagcacacactccctagcactcacatttgcagggtcgtgtggagcgttttcctggttgtggctctttctgcataaatggattgcggtattgatggttctgtgcactgcggatttgtttgtttgtttgagacagggtctcactctgttggccaggatggagtacagtgatgcactcacggctcacggcagcttccctctccagagctcgagtgatcctcctgcctcagcctcctgagtagctgggaccacaggtgggcactactatgcccagctaatttttttattttttgtaggaatggggtctccctttgttgctcaggctgatgtcagactcctgggctcaagtgatcctcccaccttggcctcccacagtgctgggattacaggtgtagccactgcagttttgagtcagtgtctccttgagccccttcccatccgtatccacagagtccacagtctggatgcaggttgcttcaccatccccttctggtgggcctgtgagtagctcaggtgccctcaggtgactttccaggctactttttttttttttttttttttttttttttttagacggagtctcgctctgttgcccaagcaggagtgcagtggcatgatctcagctcactgcaagctccacctcccaggttcataccattctcctgcctcagcctcctgagtagctgggactacaggcgcccaccaccacgcccggctaattttttgtattttgagtagagacgaggtttcaccgtgttacccaggatggtctcgatctcctaacctcgtgatccgcccgcctgagcctcccaaagtgctgggattacaggcatgagccactgcacctgccccagcctacatttttgtgcttgcctattctgttcaccaagctcatgtgctgtgtggccagcagttaccccgtgggatgtcatcctgagtggcctttgatccgtggaaggtggggtcacaaaggtcactcctgagaccaggcctttcccacatccccaggcatcccaccctgcagacagtgaggtctcatccctactccaaggtcccgagccgccagtctcaacccagctctcactagtgctgtgtgtcccttactatgggcctattccctggttatggggaaccgctggccacgaagcatttctcagaattgatagcagtgtttgctgttctaggcaggacttccaccagtgggcgatccatgagcactttctccctgagtcctcggcttcagggggctgtgacggagacctgcaggctgcgtgtaccattcttgtcaacgcactgatggatttccaccaaaggttagcagcacacactgtattagggttctctggagggacaggactaataggatatatataaaggggagtttctggccatgctggtgcccatctaattagcttagggtgggtctgcctttcccagcctatacccaaatgtcagtctcctttggcaacaccctcacagacacactcaggatcaatgctttgcatccttcagtccagtcacgttgacactcagtattaaccatcacacaccgatgaggccttacttttaatcatggtagttctaagaatgcatttttctctcagtccaattttggtatgcaaagtacacttgagcctatcacatagcaaatctatgtcaatacaaaataaagccaagcttcctgcatcggttgtttctttatgtgtatagacttgtcagaagcgacaacttcgggctgggcgtggtggctcacacctgtaatcccagcacttcgggaggctgaggtgggtggattacctcaggtcaggagttagagaccagcctggcctacatggtgaaacctccctctctactaaaaatacaaaaattagctgagtgtggtggcgggtgcctgtaatcccagctacttgggaggctgaggcaggaggattgcttgaacctgggaggcagaggttgcagtgagccgactgggcgacagagcaagactctgtctcaaaaaaaagataaaaatagcaacaacgttgtttttctgttctgtcacctggtattcaaggtgagcatgtgtgaagcacggcacaaatggcctagtagatcctgggcatcacagcctctctccatctgagagggattctcaggacagagcagttcctgaggtgttgcatgtgggccagaaggatggacggagtgtacctggggctgtccaggctttgtccccaggggctcttgtttgcagcttcacactgttgtgttacagctgcagcattcagtacagatggcaagtgtgtatgcagcttccccccatgtctcctgcctgcggcaaccacgaatccattttatgttcatggatttgcctgtttgggatgtttaatatcaacagaatcatgtagtatgtggccctttgtgtctggcttctttggctgagcagaatgtttctgaggctcatctgtgttgtagcacatatcagcatacccttccttcttatggctgactgatgctcacagaaggtatggaggctgacgcacctccatcgtgggtgacttcttgttaaccctactccaagaatgcctcctgagatttcccatttatctgctgttaccttaaatcccactcttaggtcaaaacaaccttgaggctgggcgcagtggctcatgcctggaatctcagcactgggaggccaaggcaggcggatcatctgagctcaggagctcgagaccagcctggtgaaaccgtctagacaaaaaaaaaaattagccaggcatggtagtgtgtgcctatggtcccagctactcgtgaggctgaggtgggattgcatgagccggggaggcagaggttgcaatgagctgtgaaaacaccactacattccagcctgtgtgacagagtgagactccatctcaaaacaaaaaagcaaatcttccaccataaatccagcggttagattcacagagcattcttgcctttccctgaggggttgacttcaatagtccttccctgtggtatagaagccctgcctgggggtaacagtgcagggatgcatcgtctctctaggctgcctgagacatggtttctgtctgtaagtccttaaacgtttctgtctgagaaactggattattcagcctctcttcagccttccagcttccccagcctttatgggtaggtttgcacagagctgctcactgcggaacagaaagatcagccatattttgtttatccattcactttgtttgtttgttttttgagatagtcttactttgtcttatttatatttattttgaaactgggtctttctttgtcacccaggctggggtacagtgactgcagcccactgcagcctcgacctcctgggctcaagtgatcctcctgcttcagcccctcaagtagctgggaccacaggcaccaccatacctggcaaatttttgtagttgtagtagagatggggtttcaccatgttggccagactggtcttgaacttctgacctcaggtgatctgcccgcctcggcctcccaaagtgctgggattacaggcgtgaacctctgccaggcctgacttgatggtagccatcctagtgggtattaagtgctatttgatagtggtttcgatttgcacttccctaatgggtagtgattttgaacatctttccattttcttattggccattttagattttttttggagaaatctgttcacatccttagcccatttgaaaactgggtcacattcatgtactgcataagaatgttctggttaacaacgagccacatatatgacagtaatcccacatagccataattttttgtaccttttttttaaactgtgtttttaccgtaccttttctatgtttagatacacaaatactgttgtgttacagttgcggcatgcaatacagttacatgctatgccggtttatagcctgggagcggtgggccgtgccatgtggcctaggtgtgcgggggctctggtctgtttctgcgcggtgggccgtgccgtgtggcctaggtgtgcgggcggctccggtctgtgtctgtgcggtgggccgtgccgtgtggcctaggtgtgcggggggctctggtctgtgtctgtgctcttggatgttcacgtgatgaaaccacctaaagatgtgtttctcagaatggatccttgtcattgagcagttcatgactgtatttgtcttactgagttgtatgagttctttatatattttagataaagttcttatcaaatatatgatttgtaaatattttttcccattctgttaattcttttttcactctcttgatagtatcgtttaatgcacaaaggttttaaatttttataaagtccagatcatttatttttagtttagctctttaggattttgattcattttgatggatcagaaaacattttgggccagccacggtggctcacgcctgtaatcccagcactttgggaggctgaggcgggcagatcacttgatgtcaggagttcgagaccagcctggccaacatggcgaaactaaaaaaatacaaaaactagccaggcatggtggcaggcgcctgtaatcccagctactcgggaggctgaggcggcaggagacttgcttgaacctgggaggcggaggttgcaatgagcccagattgtgccactgcactccagcctgggcgacagagtgagagactgtctcaaaaaaaaaaaaaaaattgttgtgtgaggtcatccagctttattctgttgcttgtggccatgcagttgtcccagcaccatttgttgaaaacacttctttccccactgaatggtcttggcacccttgtcaaaagttagatggctgctcgtgtgagggtttgtttctggctctcattgtgttcccttggtctgtatgtccatatgcactgcgtcattgggatgaagctttgtagtaggttttaaaattgggaagtgtgaggcctccaacttggttcttctttttcaggatggtttggcttttctaggtgctttgtagttgtgtcttaattttgggatgagcttgtcagtttcgacaaaagtagctgggaccctgatacggactgcatgtggggcagtattgccatctcagtgatagcgagtcttctttccttttgaatcatttgttgctaacgtatagaaacaccagtgattcttgtatattcattggctctagtcatttattagttctaagagtgtttttgtatcgattccttagggctttgtatatataagatcgtgtctggccaggcatggtggctcatgcctgtaatcccagcactttgggagggtgaagtgggcggatcatgaggtcaggagttggagaccagcctggccaacatggtgaaaccccatctctactaaaaatacaaaaattagccgggcatcgtggtgggctcctgtaatccgttacttgggaggctgaggcagaagaatcacttgaactcaggaggcagaggttgcagtgagttgagatcatgccactgcaactccagcctgggcgacaagagtgaaactcagtctcaaaacaaaaaaacaaaagaaagatcatataatatgtgaagagagatagtttcactttttcctttcctatctggatgctttttctttttcttgttgaattgccccggcttgaactccccgggcagtgttgttttttttgttgttgttttgttttgtttttttttttctgagacggagtctcgctctgtcacccaggctggagtgcagtggtgcaatctcggcttaccgaaaccttcgcctctcaggttcaagcgattctcctgcctcagcctcccgagtagctgggattacaggcacccgccaccatgcccagctaatttttgtttgtttgtttttgagacagagtgtcgctgtgtgtcccaggctggagtacagtggcactatctcagctgtctgcaacctccgccttccaggttcaggcaattctgctgcctcagcctcccaataggtgggattactggcgtccgctaacacgcccgtctaatttttgtatttttagtagagatagggtttcgccacattggccaggatggtctcgatctcctgacctcagatgatctgcctgcctcggcctcccaaagtgctgggattacaggcgtgagccaccgtgtctgtccccagtgcagtgttgagtagaggcagcgacactgttctgagtgtagagaggacatccttgttgcccctgatcttaggagaacagctttcagtctttcctcattaaatctgacgtttgctgtgggttttcatccatgccaggcactagattgagaagatttcctttgttcctggttgattgagtgtttttatcacaaaaggatgtcacatttcgtcaagtgctttttctacatctattgagataatcttacggtttttgctttttattttattgataactgcgttatattggtttggggatcttaagctatccttgtgtagggaccagccccggagggtcggtgggtctctccctgtgtgcggcgatgagagagtgtagaaataaagacacaagacagagataagagaaaaggcagctgggcccgggggaccactaccaccaatgcgcggagaccggtagtggccccgagtgtcgggctgcgctgttacttattggatacaaggcagaaggggcagggtaaacaatgtgagtcacctccaatgataggtaaggtcacgtgggtcacatgtccactggacagggggcccgtccctgcctggcagctgaggcagagagggagaggagacagagagaaagacagcttacgccattatttctgcatatcagggactattagtattttcactaatttgctactgctatctggaaggcagagccaggtgtacaggatggaacatgaaggtggactaggagcatgaccactgaagcacagcatcacagggagacggtgaggcctccggataactgcgggcgagtctgactgatgtcaggccctccacaagaggtggaggagcagagtcttctctaaactccccgggggaaagggagactccctttcccggtctgctaagtagtgggtgttgttccttgacaccttttgctaccgctggaccacgatccgcttggtgacgggcgtcttcccagacgctggcatcaccgctagaccaaggagccctctggtggccctgtccgggcacaacagaaggctcgcactcttgtcttctggtcacacctcagtatatcccctcagctcctatctctgtatggcctggtttttcctaggctatgattattgagtgaggattatcataatattggaataaaaagtaattgctaccaactaatgattaatgatattcatatgtaatcatatctaagatctatatctggtataactattcttgttttatattttattatactggaacagctcgtgtcctctgtctcttgccttggtgcctgggtggcttgccacccacatccttgcattcttgggataagcctccttggtcatggtacataatttttgtatttcctaggttggggttggtagtattttgtggcagtttttgttgtttattgttgactaatgtgagggtcacactgtcagagaagcacagccatcactcagctccggaggcaggaggagaactgggaacttcagcactattaggcgatactgaggaggattttattgtattttcatttcagctcaaggagttatgaccactcagaaaattctgatttggtctttggtggccgcacaggaaatgaggatattatttccagattgcaggtgagtttgagggtgccacaactcagtgcattcacttcatttaagccgcgtgctattaagatatttattgccaggcgcggtggctcacgcctgtaatcccagaactttgggaggccgaggcaggcggatcacacagtcaggagatcgagaccatgctggctaacacgatgagaccccgtctctactaaaaatacaaaaatttagccgggcgtggtggcgggcacctgtagccccacctactcgggaggctgaggcaggagaatggcatgaacccaggaggcggagcttgcagtgagccgagattgtgccactgcactccagcctgggcgggcgacagagtgagactccgtctcaaaaaaaaaaaaaagatatttattgttggctcaggcttgtaatcccagtactttgggagtccgaggctggtggatcacctgaagtctatacaggtaggcagcatgtacctgtgtgggttcactgtcagtcaacaggcatttactggtgctggccacccgtgcgtcttctgtgccaggcccctgtctctccctccgccagctctggggcctcccaactccttagccagatgctttccctagacccacctggctccttctcagtgagaccatctgctttttcctcttaattgtaatcataattattattattattgggacagggtcttgctctgtcacccaggctagagtacagtggtgcgatcatatctctctgcagccttgacttcctgggctcaagcaatcctgacagcgtgcacctgtgtgcgccaccacacccagctgattttttgtagagacggagttttgccatgttgcccaggcttgtctcgaactcctgggcccaagtgaaccacccatctcggtctccaaaattgttggattacaggcgtgagccactgcacctgatctttattcttctttaaaaaatacagccggccaggcacggtggcttatgcctgtaatcccagcactttgggaggctgaggtggctagatcacttgaggtcaggggctcaagaccagtttggccaacatggtgaaaccccatctctactaaaaatacaaaacactagtcaagcatggtggtgtgtacctatagtcccagctactcaggaagctgacttaggagaatcagctgagctcgagagtcaaggctgccataagccaagactgcactgccgcactccagcctgggcaaccggactgagactgtcctaacaacaacaacaacaacaaaagacttgtgaggcaaaaatgatgtgtggggtaaaatgttagccagaggttaatctgggtgaagggcacatgagtgtcctcctgctgtttttttttgttgttgttttgttttgttttgtctgtttgtttttgagacagagtcttgctctggagtgcagtggcgggatcttggctcactgcagcctctacctcccgggttcaaactattctcctgcctctgcctcctgattagctgggattacaggcgcctgccaccacacccagctaatttttgtatggctaattttgttggccaggctggtcttggactcctgacctcaggtaatccatctgtcttggcctcccaaagttctgggattacaggcgtgagccaccatacctggctgtttttttttgtttgtttttttttgagacggagtctcactctgttgcccagtctgaagtgcagtggtgcgatctgggctcactgcaagctccacctcccgggttcacgccattctcctgcctcagccgcctgagtcgctgggactacaggcacccgccaccatgcccagctaatttttttgtattttttagtagcgacagggtttcaccatgttagccaggatggtctccatctcctgacctcgtgatcctcctgccttggcctcccaaagtgctgggattacaggcatgagccaccacgcccagctgttttttcttaattgataagtagttgataagtagtactgtaactcctgggctcaaggaatctgcctgcctcggcctcccaaagtgctggcattacagacgtgagccacagcacccggcctgcactgttctatatttgcaatttcaaagtgatttccaattgaaatagcttgccccacttgttccttcttgccctgtccactgtggagacctctccctgacccctgacgtctgggtccccgactggctgggcagtgagccccgaggccttcctgtgccagcatactgctctttttcaggagatggtagctgacctggagctgcagcaagacctcatagtgcctctcggccacaccccttcccaggagcacttcctctttgagattttccgcagacggctccaggctctgacaagcgggtggagcgtggctgccagccttcagagacagagggagctgctaatgtacaaacggtaacacctactaccacctgggcagggcagcaccacctgggcagggcagcatctcatgacggtcctagaggttctttgtagtgagtttgtttcccgttacttacttgtctgtgtgtccccaccccaagcctgtccatttctgtggcacatgccacggagaagaggatctggagggttgaaagtacttttgattaaaaccttccagccaagcgaggtggttcatgcctgtaatcctagcattttgggaggctgaggtgagtggatcacctgaggtcaggagtttgagaccagcctgaccaacatggcgaaacgccatgtctactaaaaatacaaaaaaaatacaaaaaaatttagctaggtgtggtggcgggcacctgtaatcccagctactcgggagactgaggcaggagagtggtgtgaacctgggaggcagaggtttcagtgagccgagatcacgccattgcacaccagcctgggcaacagagcgagactctgtctcaacaacaacaacaaaaccttcctgctcagacgtggagggacgtcgcagaaggagctcttgtgaaagtagggaaaagtgttcagaaatgcccacggcggctgcatttataagaagcagcgtggagtcatttaattttacagtcatagggaattgcttcactagacagactggtgcgtcatccacttggttatcgtgtaactgtcagaagttgttggttattatgtaactgttaaaagttgtttgtttggtaacacattttgaatgcagtgggccaaacacagtataggggaggtgggctcagagtgcaggctttggatgggacagagggacacaggccaaggctctggttccaacagtggccctgggtttcagggtggtggttgctgctctgagagtctgagcccttgggaaggagcagagtgtacgctgtgctgtcgccaccaatacagccccttctttccaggatcctcctccgcctgccttcgtctgtcctctgcggcagcagcttccaggcagaacagcccatcactgccagatgcgagcagttcttccacttggtcaactctgagatggtaggtgccccgtgtgcacgtgtccgtccgatctgtcagtgcctgtggcgctaacagcagctcttgcagcctccatgcgtgtactgaccgtgtgaattactgaggaaagggttcaaagtcaaatagggaacagtgtctggaatgccatgtgagggaggaccccacccacagccaggacggcgaccagcacatcaccaaaccagctgtaggttgccttctcccaagtttgagttcctttagtttccctcaagttttaatgattttgacacatggaatcgtacagaccattttgtgtgccacgcacctcggttcatttatttctaatctcaacatgcttcatgtgtaaaaaaagccttgtggtgatctgactaccgctgttgcctgccaggcagcccagttatcttccattttagacactgcccagcgtgagttgcagggtgatcttaaccagcaggctgggtgcggtggctcacgcccgtaatcccagcactctggaaaggtgggggatcacttgagcccaggagttcgagaccagcctgggcaacatgacaaaaccctgtttctacaaaaaatagaaaaattagctgggtatggtggtgcacgcctgtactcccacctacttgagaggctgggtcaggaggagtaattgagcccaggaggcagagttgcactgagccaagatcccaccactacactccagcctgggtgacagagcgaaactcttgtctcaaataaaaagaagtgacactcgctgtggggacgggcagcgtagggacccagttggtcagagctggggagacggataccagcccctcccactctacagagagcagcttctgctcccgaaggcctttttcttgtttttgaagatgcacaaatgtgagagatggaattcaggttccatgccagctgtgcagcattttatatttttatttatttatttatttatttattttttgagacagagtcttgctctgtcgcccaggctggagtgcagcagtgaaatcttggctcaccctgcaacctccgcctcccaggttcaagcgattctcctgcctcagcctcctgagtagctgggactacaggtgcctgccgccatgaccggctaagttttgtatttttagtagagatgacgttttaccatgttggtcagtctggtcttgaactcctgacctcgtgatccacccgccttggcctcccaaagtgctgggattacaggtgtgagcccggccttgtgcagcacttcaaaatgtgacaaggaaagcagaggacgtgagactagcaaaagctttcagaaaatcactatggtctcctttgaattcttatgaatggctgtttttcagaaagctctcagttggcacgtgacagccgacagacaggaaaacaccatagacagcacttggttagtgaagggaccagaggatggttggcccttggtattagtgtcgtcctcaccacagttctacgctccgggtgcgtccccttccctgcggctgcttgtgcctccctggcttcttcctggagcctacaagactgtttgggccagagctggtgggctgcaggatctggccgcccagggaagccgttaagtttcaggacagcacagccagggcgccaggcccggtcagcccaggagcaccatccatggtggccacgccaagccttagcgagtgtttttctcaaaactgaatccacagcagccactctgcatgttggtctcgcctctcttcctgtgggcttttcttacctgccttgaactcttttgcagagaaacttctgctcccacggaggtgccctgacacaggacatcactgcccacttcttcagggtgagatgctccctcagcccctctcgtggccttctcagaacgccgtgggtggatcctcctgtcagcttcctgtgagttccttcactctactagttgtgggtcctcacaaaccgctgacctcctgctgcgttctctcctgcagggcctcctgaacgcctgtctgcggagcagagacccctccctgatggtcgacttcatactggccaagtgccagacgaaatgccccttaattttgacctctgctctggtgggtcagctgtcttgtttggtgttttgttttggggatgagtgggagactccacagctgcctctggcatctctgcagcacgtctccatcacgggtgttaccatctcagggaaaatgcatcaggagacatggaagccacagttaaagatgccagctcatagcagatgagggccgcacatcctgagttcccagaaccgtccctgcccccaccgccgtcaccatggcacccgcaggacttctcccctgtggaccccactcagaccccacgggcaccttcatgtccacaggggtgcagggcttgtttgttcacggtcttgggttgtgcactggctggaggctgtacggtggctgcctgtgccccgtcacgagagcatgactgtggcccacttgcgcctgactatgctttcttgggacttcggagcagagacttcacctcagctcccgccagagctcagcaggctcccctagcagcccagggtcccgagagtgggaggagggcagcatttccctcacttccctggcggctcacttagtcctgaagaccacagctgtcgcccttccttctcggtcatcagggacaggagggcctttttctccgcagcacggcatgttccccagggagctccccaagcaggctgcatttgcaccgagttgtagctcagttggtggaattcgtgagaaatgaactcttcggtgtttagaacgccacctctcagctgagggcatccaaggaccaggcattcccagctcagggcagtgtggtctcttcactgtttcgttcccagctcagaggagtgtggtcccttcactgtttcgttcccagctcagggcagtgtggtcccttcactgttttgttcccagctcagaggagtgtggtcccttcactgttttgttcccagctcagggcagtgtggtcccttcactgttttgttcccagctcagaggagtgtggtcccttcactgtttcgttcccagctcagggcagtgtggtcccttcactgttttgttcccagctcagaggagtgtggtcccttcactgtttcgttcccagctcagggcagtgtggtcccttcactgtttcgttcccagctcagaggagtgtggtcccttcactgttttgttcccagctcagaggagtgtggtcccttcactgttttgttcccagctcagaggagtgtggtcccttcactgtttcattcccagctcaggggactgtggtcccttcactgtttcgttcccagctcaggggagtgtggtcccttcactgttgcgttaggccaggctcttccttctccaaattccacgtcttccatgagtgtgggtaataaatgcctcatggaactgctttgagccttaattgacgtaaaaaatactggctttggagttccagagcgcagggcgagtgtgggcctgtagtggcctgtaggagcactgggggcttgtcatggctggggcagcggaggtgtgtccatctcagccaccctcatctgtgtgctggtgctctctccataggtgtggtggccgagcctggagcctgtgctgctctgccggtggaggagacactgccagagcccgctgccccgggaactgcagaagctacaagaaggccggcagtttgccagcgagtacgtgtgggtggtgagatggggtgtgcccgcccagatgcacttcgggacctgctcaaggtcatctcctaaacaccctggcttgcttgagagaagcggtgtgggcagcctctcgtgtgagcagggagaaaagaaccgagttctcgtggtggtgggcgcctgtaatcccaactactggggaggccgaggcaggagaatcagttgaacccaggaggtggagtttccagtgagccgagatcactccaacggccaatagagcaagactctgtccagaaaaaaaacaaaaaaaaaaacagcctctgccagtgtctcgtctgagtgaggaacggcctctcccaggctcccgtctgagtgaggagctcgagtgattcctttgcacctgctccccttcctcttaaatctaatgtgggctcctagagtgcaccgcgtgctggtagggtcagtgtcatggggacctcagggatgcagattctcagcctaccctgacctgtcgaccccagtcagatattcacgggtccttgcaaaccatcaagctcctggcgcaatccaggctcacacacccttctgaggaccacagagctgacagccactccacctgctgaatgtgggtgccgtgttcttaaggggtcgtcagagggcactgctagtacccatcctgcctccttggagaacaccttactttgtgactagttttgaatcactgatgccacaccgggtcccctcagggtttggctgctcgccgtctgctgaaagaagagaagagggccccggcgcggtggcgcacacctgtaatcccagcactttgggaggccaaggcaggtggatcacctgaggtcaggagtttgagaccagcctggccaacatgtgaaacaatctctactgaaaatacagaaatgagctgggtgtgatagtgtgcgcctgtagtcccagctactcaggaggctgaggcaggagaattgcttgaacccaggaggtggaggttgcagtgagccgagatcatgccattgtagtccagcatgggcaatgagagagaaactccatctcaaaaaaggagaaagcaggtcacacctccagttctaattctacaaacacagatcagattgtctgaagttttgttttttgttttgttttgtttgagacagagtttcactcttgtcacccaccctagagtgagatggcacgatctcggctcaccatgacctccgcctcccaggttcaagcgatcctcctgcctcagtctcctgagtagctgggattacaggcgtgagccaccatgcctggctaattttgtatttttagtagagacagggtttctccacgttggtcaggctggtctcgaactcccgacctcaggtgatctgcctgcctcagcctcccaaagtgctgggattacaggcgtgaaccaccacgccctgcctcgtttttgtttatttgagattgagtctcactgtgttgcccaggcagatctcaaactgctgggcttaagcgatcctcctgaagtgctatgattgcagatgtgaaccgtcatgcccagcttatttaaagtctcttaaaccacagcattgtttcattaatttcctaccaattttttaaccagccagaaaactcagacaccacactggggccagagccaggcagtcctttgttctctgttgtaggagggaatgcctgatccacagggccaggcatgggcaactgaggaaaatgaggcctcttcttccaaaatgtaggcagctggggcccaagagcacagggcaaggtagacaggaccaggccagctgcctgctcagtcagcagctctcagaacgccaggatgctgtgggggcagcaccagcacctgcccacactctcacgtggacctgggggatgcagacctagtttctgatggtcctgaaacccttctctgtcctctgatggaaaggcaggccccaaaggtgacaggtgggaataaggacttggtttctatggcgtggttgtatggttgtaaggccctgcaatgaccccgttctctctgtcccagtttcctctcccctgaggctgcctccccagcacccaacccggactggctctcagctgctgcactgcactttgcgattcaacaagtcagggaagaaaacatcaggaagcagctaaagaagctggactgcgagagagaggaggcaagataggaaattcttttactgatttattttctcgcaagcttggtttcaatcagtgctatttctctgggcttgtctgatgaactgtttttctaaagacaaatatgtggcttggagcaagactttttttttttttttttttttttgtatttttagtagagacggggtttcactgtgttagccaggatggtctcgatctcctgaccccgtgatcctcccgccttggcctcccaaagtgctgggattacaggcgtgagccaccacgcccagctggcttggagtaagactttgactatcaagtttactagtaaaaataataatttcagttttttaaatggttgtatgtagttgagacagggtctcactgtcgcccaggctggagtgcagtggtgcagtcagctcactgcagcctcttctgggctcaagccatcctcttacctcagcctctggagtagctcagactacaggtgtgtgccaccatgcccggctaattttgtaattttttctgagatgggggtctgtagtccaggcatggtggctcatgcctgtaatcccaacacttagggaggccgaggcaggcggatcacttggtgtcaggagtttgagaccagcttgggcaacatggtgaaaccctgtctctactaaaaacacaaaaattagtcgggtgtggtggtgcgcacctacaatcccatagcctgtaaagctactcaggaggctgaggcaggaggatcacttgaacccagggggcagaggctgcagtgagccaagatcacgccactgccctgcagtctgggtgacagagcgagacttgtctcaaaaaaaaaaaatttgtttaaagtaaaaattaaaagagatgggggtctcactgtgttgcccaggcttgaagtgcgtttcttcagcttatttttatcctcatcacagcccagcgtaaatgctgtcagccttcaagtggtgccttctgtgttcatgctgcagtagccttgattcatgtgctgagggacagccccagataagcttgcagtgagacagctcagacctggggtgctggggacaagaggcagcaaggatgggaccgtctgcagccataggcatagggaaaggagtgggagaggctgctcttgaattccaggccagggaccatgttcgactcagacccactgcccacctggttgctgcaccctggaaagcctgactgcccccacaagaccagtgacacccacacagctctctgtgcagggagccaagggtggtgtgtgcagaacaggaacagaaacaagcatcccacaagagagctggaggcagcagccctctgtgcccagcccgagatccgcaacgcataggtgccatgtcagcacacaacttacaccagctcaaagctggatcgacagcagcgcccagggttttggtgattataaccaccctgcaggggttcttctgagtacgtcttcaggtttcttgtgtagttttgttagaagggattttagtggctccagggccttaggaccctagtgtgcagcgaggagtgtccacagagaccctgcccagtcaggccctactttaggctggagcctgtgggcttatcttcaaggattttacaaacacttctgacaggaggccttgcagggagatgatgctgagttgggactgcgcacagccaaggagaccgcagcagtcttctctttctggctcttgtcactttttcaaactgtttctagctttgtttaaaggcaagtgtgaaatgacccagccagtagtaattaattctcaattaagctgtctctctagaagtgattggaaagttttctaagatccacttaaaggatttatggcctagatgtaaaaaatttcaattaaagaggaatgtgtcagccttatttagaatgacagcacaggtaattttaatgtaataataagtgcacgtttttatttacagctattggttttccttttcttcttctccttgatgggcctgctgtcgtcacatctgacctcaaatgtaagtcagaccttaccagccaaggtgtcctctcccactgtgggccaggcaggggcaccaggcagccagcttccaagtcagggtttccagactagctcaggagctccttgtgtttgcggaagtgtgagtgagaactcccaggccgtgggttttttttttttttttttgagatgggggtctcactctgtcacccaggctggagtgcagtggtgtgatctcagctcactgcaacctcagcctcctgggttcaagcaattctcctgcatcagcctcccgagtagctgggattacaggcgtgagtctgtcacacccggctaatttttgtatttttagtagagacggggtttcaccatattgccaggctggtcttgaactggcctcagtgatccgccgacctcggcctcccaaagtgttgggattacaggcatgagccactgcatccggcctgtgggcctttcttttaatgtcttatttgaggacgtggtgcagcagccttggtgtgggtgctcgaagtccctggcctcctacctgagcctcttctgtccagaggcccagtattaccttctataggtaaaactgtcaccagttttaagacttacaataagcaaagaggaaatgccctcttctgtgctgagggctgtaccctcctacccatgggagcaccaggtcggccattctcagggttggtctcctgcggtttacagagcaccacagacctgccaaaggctttccacgtttgtgcagcaatcctcgagtgtttagagaagaggaagatatcctggctggcactctttcagttgacagagagtggtaagaaacacgctgctgaggcacaaatgcggagggccgctcttttcagaggcatcttgcaaatggttaagaacgagccctccttgaggttccttgctaagtaagtttataagctccattttagttgggacagattaagcacaaacttgtttaaagcaataagataatttactggctcactggtcaaccccaggaccaatgggcctatcatggggactgcctctctctgcaccacacccaccctcctgcaagaggtcgacccccccatcctctcccagctgctgacaggtacctgggtatcctcagctcaggctgttcgccccacactatccccacagccaggcctcccagggtacacgtcccgacccccaggggtgtccccagcactgataataggcagagatgtccagagttgcctgagccacttcttggtgttgcagacctcaggctggggcggctcctcctccgtgtggccccggatcagcacaccaggctgctgcctttcgctttttacaggtacctccacccacagggctggtcagggctgggcagtgtttcccagacccccatctcagcacctctgggtcccgccagatgggaagggttgtctgtgcctctgctccacagatgagcagtatcccttggcatcacctgctacctttccagcagtctgtagccatttgtcactatgtctttacctctagtcttctctcctacttccatgaagacgcggccatcagggaagaggccttcctgcatgttgctgtggacatgtacttgaagctggtccagctcttcgtggctggggatacaagcacagtttcacctccagctggcaggagcctggagctcaagggtcaggcaggtgcaagggccagtcccacctccaggggagctccccccagccggaggctccttctgccaaagaatgttccggcacagcatgcagactatgggggacacaccagccctgtttctgtatgtcttctaacctgtgagtttgcctgttttctctctagggcaaccccgtggaactgataacaaaagctcgtctttttctgctgcagttaatacctcggtgcccgaaaaagagcttctcacacgtggcagaggtaacgtcaagatgcccaccttgggccatgtgggggacatgagaattgacagctgcctgggccatgtgcctgcctggctggcaatacaactcgactatttctgccagagcccctcccctgtggtctgaggcctagtgggcggcatgggctgaggacctgctcctctctcacagctgctggctgatcgtggggactgcgacccagaggtgagcgccgccctccagagcagacagcaggctgcccctgacgctgacctgtcccaggagcctcatctcttctgacgggacctgccactgcacaccagcccagctcccgtgtaaataatttattacaagcataacatggagctcttgttgcactaaaaagtggattacaaatctcctcgactgctttagtggggaaaggaatcaattatttatgaactgtccggccccgagtcactcagcgtttgcgggaaaataaaccactggtcccagagc
